(19) United States
(12) Patent Application Publication
(10) Pub. No.: US 2023/0227552 A1
(43) Pub. Date: Jul. 20, 2023

(54) ANTI-TCR ANTIBODY MOLECULES AND USES THEREOF

(71) Applicant: Marengo Therapeutics, Inc., Cambridge, MA (US)

(72) Inventors: Seng-Lai Tan, Sudbury, MA (US); Brian Edward Vash, Cambridge, MA (US); Jonathan Hsu, Waltham, MA (US); Dilini Charmain Gunasekera, Cambridge, MA (US); Sangeetha Sagar Palakurthi, East Walpole, MA (US); Andreas Loew, Boston, MA (US); Madan Katragadda, Acton, MA (US); Peter Marek, Hudson, MA (US); Gurkan Guntas, Newton, MA (US)

(21) Appl. No.: 17/855,332

(22) Filed: Jun. 30, 2022

Related U.S. Application Data
(63) Continuation of application No. PCT/US2020/067543, filed on Dec. 30, 2020.
(60) Provisional application No. 63/070,596, filed on Aug. 26, 2020.
(60) Provisional application No. 62/957,024, filed on Jan. 3, 2020.

(51) Int. Cl. C07K 16/28; A61P 37/04; A61P 35/00

(52) U.S. Cl. CPC C07K 16/2809; A61P 37/04; A61P 35/00; C07K 2317/565; C07K 2317/52

(57) ABSTRACT

The disclosure provides antibody molecules that bind to TCR VP regions and multispecific molecules comprising said antibody molecules. Additionally, disclosed are nucleic acids encoding the same, methods of producing the aforesaid molecules, pharmaceutical compositions comprising aforesaid molecules, and methods of treating a cancer using the aforesaid molecules.

### CROSS-REFERENCE TO RELATED APPLICATIONS

[0001] This application is a continuation of International Application No. PCT/US2020/067543, filed on Dec. 30, 2020, which claims the benefit of U.S. Provisional Application 62/957,024 filed on Jan. 3, 2020, and U.S. Provisional Application 63/070,596 filed on Aug. 26, 2020 the entire contents of each of which are hereby incorporated by reference.

### SEQUENCE LISTING

[0002] The instant application contains a Sequence Listing which has been submitted electronically in ASCII format and is hereby incorporated by reference in its entirety. Said ASCII copy, created on Jan. 29, 2021, is named 53676_736_301_SL.txt and is 1,197,327 bytes in size.

### BACKGROUND

[0003] Current molecules designed to redirect T cells to promote tumor cell lysis for cancer immunotherapy typically target the CD3 epsilon (CD3e) subunit of the T cell receptor (TCR). However, there are limitations to this approach. Previous studies have shown that, e.g., low doses of anti-CD3e monoclonal antibody (mAb) can cause T cell dysfunction and exert immunosuppressive effects. In addition, anti-CD3e mAbs bind to all T cells and thus activate a large number of T cells. Such non-physiological massive activation of T cells by these anti-CD3e mAbs can result in the production of proinflammatory cytokines such as IFN-gamma, IL-1-beta, IL-6, IL-10 and TNF-alpha, causing a “cytokine storm” known as the cytokine release syndrome (CRS), which is also associated with neurotoxicity (NT). Thus, it might be advantageous to develop antibodies that avoid or reduce CRS and/or NT.

### SUMMARY OF THE INVENTION

[0004] In some aspects, provided herein is, inter alia, a multispecific molecule, optionally a bispecific molecule, comprising a first moiety, optionally a first immune cell engager, comprising an antibody molecule which binds, optionally specifically binds, to a T cell receptor beta variable region (TCRβV) (“anti-TCRβV antibody molecule”), wherein binding of the first moiety to the TCRβV region results in a cytokine profile that differs from a cytokine profile of a T cell engager that binds to a receptor or molecule other than a TCRβV region (“a non-TCRβV-binding T cell engager”).

[0005] In some embodiments, the multispecific molecule as provided herein comprises a second moiety which comprises one or more of: a tumor-targeting moiety, a cytokine molecule, a stromal modifying moiety, or an anti-TCRβV antibody molecule other than the first moiety.

[0006] In some embodiments, the first moiety comprising the anti-TCRβV antibody molecule comprises an Fc region comprising a variant, optionally an Fc variant described in Table 21, optionally an Asn297Ala (N297A) mutation or a Leu234Ala/Leu235Ala (LALA) mutation.

[0007] In some embodiments, the non-TCRβV-binding T cell engager comprises an antibody that binds to a CD3 molecule, optionally CD3 epsilon (CD3e) molecule; or a TCR alpha (TCRα) molecule.

[0008] In some embodiments, the cytokine profile of the first moiety comprises, one, two, three, four, five, six, seven, or all of the following:

[0009] (i) increased level, optionally expression level, and/or activity of IL-2;

[0010] (ii) reduced level, optionally expression level, and/or activity of IL-1β;

[0011] (iii) reduced level, optionally expression level, and/or activity of IL-6;

[0012] (iv) reduced level, optionally expression level, and/or activity of TNFα;

[0013] (v) reduced level, optionally expression level, and/or activity of IL-10;

[0014] (vi) a delay, optionally at least 1, 2, 3, 4, 5, 6, 7, 8, 9, 10 or more hours delay, in increased level, optionally expression level, and/or activity of IL-2;

[0015] (vii) a delay, optionally at least 1, 2, 3, 4, 5, 6, 7, 8, 9, 10 hours delay, in increased level, optionally expression level, and/or activity of IFNg; or

[0016] (viii) increased level, optionally expression level, and/or activity of IL-15, optionally wherein (i)-(viii) are relative to the cytokine profile of the non-TCRβV-binding T cell engager.

[0017] In some embodiments, binding of the first moiety to the TCRβV region results in reduced cytokine storm, optionally reduced cytokine release syndrome (CRS), as measured by an assay of Example 3, optionally relative to the cytokine storm induced by the non-TCRβV-binding T cell engager.

[0018] In some embodiments, binding of the first moiety to the TCRβV region results in one, two, three or all of:

[0019] (ix) reduced T cell proliferation kinetics;

[0020] (x) cell killing, optionally target cell killing, optionally cancer cell killing, optionally as measured by an assay of Example 4;

[0021] (xi) increased Natural Killer (NK) cell proliferation, optionally expansion; or

[0022] (xii) expansion, optionally at least about 1.1-10 fold expansion, optionally at least about 1.1, 1.2, 1.3, 1.4, 1.5, 2, 3, 4, 5, 6, 7, 8, 9, or 10 fold expansion, of a population of T cells having a memory-like phenotype, optionally wherein (ix)-(xii) are relative to the non-TCRβV-binding T cell engager.

[0023] In some embodiments, the population of T cells having a memory-like phenotype comprises CD45RA+ CCR7− T cells, optionally CD4+ and/or CD8+ T cells.

[0024] In some embodiments, the first moiety binds to one or more of a TCRβV subfamily chosen from:

[0025] (i) TCRβ V6 subfamily comprising, optionally one or more of TCRβ V6-4*01, TCRβ V6-4*02, TCRβ V6-9*01, TCRβ V6-8*01, TCRβ V6-5*01, TCRβ V6-6*02, TCRβ V6-6*01, TCRβ V6-2*01, TCRβ V6-3*01 or TCRβ V6-1*01;

[0026] (ii) TCRβ V10 subfamily comprising, optionally one or more of TCRβ V10-1*01, TCRβ V10-1*02, TCRβ V10-3*01 or TCRβ V10-2*01;

[0027] (iii) TCRβ V5 subfamily comprising, optionally one or more of TCRβ V5-6*01, TCRβ V5-4*01, TCRβ V5-1*01 or TCRβ V5-8*01;

[0028] (iv) TCRβ V12 subfamily comprising, optionally one or more of TCRβ V12-4*01, TCRβ V12-3*01, or TCRβ V12-5*01;

[0029] (v) TCRβ V27 subfamily;

[0030] (vi) TCRβ V28 subfamily;

[0031] (vii) TCRβ V4 subfamily comprising, optionally one or more of TCRβ V4-1, TCRβ V4-2 or TCRβ V4-3;

[0032] (viii) TCRβ V19 subfamily;

[0033] (ix) TCRβ V9 subfamily; or

[0034] (x) TCRβ V11 subfamily comprising, optionally TCRβ V11-2.

[0035] In some embodiments, the anti-TCRβV antibody molecule:

[0036] (i) binds specifically to an epitope on TCRβV, optionally the same or similar epitope as the epitope recognized by an anti-TCRβV antibody molecule as described herein, optionally a second anti-TCRβV antibody molecule;

[0037] (ii) shows the same or similar binding affinity or specificity, or both, as an anti-TCRβV antibody molecule as described herein, optionally a second anti-TCRβV antibody molecule;

[0038] (iii) inhibits, optionally competitively inhibits, the binding of an anti-TCRβV antibody molecule as described herein, optionally a second anti-TCRβV antibody molecule;

[0039] (iv) binds the same or an overlapping epitope with an anti-TCRβV antibody molecule as described herein, optionally a second anti-TCRβV antibody molecule; or

[0040] (v) competes for binding, and/or binds the same epitope, with an anti-TCRβV antibody molecule as described herein, optionally a second anti-TCRβV antibody molecule, wherein the second anti-TCRβV antibody molecule comprises an antigen binding domain comprising a heavy chain complementarity determining region 1 (HC CDR1), a heavy chain complementarity determining region 2 (HC CDR2) and/or a heavy chain complementarity determining region 3 (HC CDR3) of SEQ ID NO: 1 or SEQ ID NO: 9; and/or a light chain complementarity determining region 1 (LC CDR1), a light chain complementarity determining region 2 (LC CDR2), and/or a light chain complementarity determining region 3 (LC CDR3) of SEQ ID NO: 2, SEQ ID NO: 10 or SEQ ID NO: 11.

[0041] In some embodiments, the anti-TCRβV antibody molecule comprises an antigen binding domain comprising:

[0042] (a) a HC CDR1, a HC CDR2 and/or a HC CDR3 of SEQ ID NO: 15, SEQ ID NO: 23, SEQ ID NO: 24 or SEQ ID NO: 25; and/or (b) a LC CDR1, a LC CDR2, and/or a LC CDR3 of SEQ ID NO: 16, SEQ ID NO: 26, SEQ ID NO: 27, SEQ ID NO: 28, SEQ ID NO: 29 or SEQ ID NO:30; or

[0043] (a) a LC CDR1, a LC CDR2 and/or a LC CDR3 of SEQ ID NO: 2, SEQ ID NO: 10 or SEQ ID NO: 11; and/or (b) a HC CDR1, a HC CDR2 and/or a HC CDR2 of SEQ ID NO: 1 or SEQ ID NO: 9.

[0044] In some embodiments, the anti-TCRβV antibody molecule binds the same or different TCRβV subfamily members.

[0045] In some embodiments, the multispecific molecule as provided herein comprises an antibody molecule chosen from a bispecific antibody molecule, a bivalent antibody molecule, or a biparatopic antibody molecule.

[0046] In some embodiments, the multispecific molecule as provided herein comprises a bispecific antibody molecule that binds to two different TCRβV subfamily members.

[0047] In some embodiments, the anti-TCRβV antibody molecule binds:

[0048] one or more of a TCRβ V6 subfamily member and one or more of a TCRβ V10 subfamily member;

[0049] one or more of a TCRβ V6 subfamily member and one or more of a TCRβ V5 subfamily member;

[0050] one or more of a TCRβ V6 subfamily member and one or more of a TCRβ V12 subfamily member;

[0051] one or more of a TCRβ V10 subfamily member and one or more of a TCRβ V5 subfamily member;

[0052] one or more of a TCRβ V10 subfamily member and one or more of a TCRβ V12 subfamily member; or

[0053] one or more of a TCRβ V5 subfamily member and one or more of a TCRβ V12 subfamily member.

[0054] In another aspect, provided herein is a multispecific molecule, optionally a bispecific molecule, comprising the anti-TCRβV antibody molecule as provided herein.

[0055] In another aspect, provided herein is an antibody molecule which binds, optionally specifically binds, to a T cell receptor beta variable chain (TCRβV) region, wherein the anti-TCRβV antibody molecule comprises an antigen binding domain comprising:

[0056] (a) a light chain variable region (VL) comprising:

[0057] (i) one, two or all of, optionally three, a light chain complementarity determining region 1 (LC CDR1), a light chain complementarity determining region 2 (LC CDR2), and a light chain complementarity determining region 3 (LC CDR3) of SEQ ID NO: 10 or SEQ ID NO: 11; and

[0058] (ii) a framework region (FR) having at least 95% identity with one, two, three, or all of, optionally four, a non-murine germline framework 1 (FR1), a non-murine germline framework region 2 (FR2), a non-murine germline framework region 3 (FR3), and a non-murine germline framework region 4 (FR4); and/or

[0059] (b) a heavy chain variable region (VH) comprising:

[0060] (i) one, two or all of, optionally three, a heavy chain complementarity determining region 1 (HC CDR1), a heavy chain complementarity determining region 2 (HC CDR2) and a heavy chain complementarity determining region 3 (HC CDR3) of SEQ ID NO: 9; and

[0061] (ii) a framework region (FR) having at least 95% identity with one, two, three, or all of, optionally four, a non-murine germline framework 1 (FR1), a non-murine germline framework region 2 (FR2), a non-murine germline framework region 3 (FR3), and a non-murine germline framework region 4 (FR4).

[0062] In some embodiments, the VL comprises an amino acid sequence having a consensus sequence of SEQ ID NO: 230.

[0063] In some embodiments, the VH comprises an amino acid sequence having a consensus sequence of SEQ ID NO: 231.

[0064] In some embodiments, the anti-TCRβV antibody molecule as provided herein binds to TCRβ V6, optionally one or more of TCRβ V6-4*01, TCRβ V6-4*02, TCRβ V6-9*01, TCRβ V6-8*01, TCRβ V6-5*01, TCRβ V6-6*02, TCRβ V6-6*01, TCRβ V6-2*01, TCRβ V6-3*01 or TCRβ V6-1*01, or a variant thereof.

[0065] In some embodiments, the anti-TCRβV antibody molecule comprises an antigen binding domain comprising:

[0066] (i) a HC CDR1, a HC CDR2 and a HC CDR3 of SEQ ID NO: 1 or SEQ ID NO: 9, or an amino acid sequence listed in Table 1; or

[0067] (ii) a LC CDR1, a LC CDR2, and a LC CDR3 of SEQ ID NO: 2, SEQ ID NO: 10 or SEQ ID NO: 11, or an amino acid sequence listed in Table 1.

[0068] In some embodiments, the anti-TCRβV antibody molecule comprises an antigen binding domain comprising a light chain variable region (VL) comprising one, two or all, optionally three, of a LC CDR1, a LC CDR2 and a LC CDR3 of SEQ ID NO: 2, SEQ ID NO: 10 or SEQ ID NO: 11, or an amino acid sequence listed in Table 1.

[0069] In some embodiments, the anti-TCRβV antibody molecule comprises an antigen binding domain comprising a heavy chain variable region (VH) comprising one, two or all, optionally three, of a HC CDR1, a HC CDR2 and a HC CDR3 of SEQ ID NO:1 or SEQ ID NO: 9, or an amino acid sequence listed in Table 1.

[0070] In some embodiments, the anti-TCRβV antibody molecule comprises an antigen binding domain comprising:

[0071] (i) a VL comprising: a LC CDR1 amino acid sequence of SEQ ID NO: 6 or an amino acid sequence with not more than 1, 2, 3 or 4 modifications, optionally substitutions, additions or deletions thereof, a LC CDR2 amino acid sequence of SEQ ID NO:7 or an amino acid sequence with not more than 1, 2, 3 or 4 modifications, optionally substitutions, additions or deletions thereof, and/or a LC CDR3 amino acid sequence of SEQ ID NO:8 or an amino acid sequence with not more than 1, 2, 3 or 4 modifications, optionally substitutions, additions or deletions thereof; and/or

[0072] (ii) a VH comprising: a HC CDR1 amino acid sequence of SEQ ID NO: 3 or an amino acid sequence with not more than 1, 2, 3 or 4 modifications, optionally substitutions, additions or deletions thereof, a HC CDR2 amino acid sequence of SEQ ID NO:4 or an amino acid sequence with not more than 1, 2, 3 or 4 modifications, optionally substitutions, additions or deletions thereof, and/or a HC CDR3 amino acid sequence of SEQ ID NO:5 or an amino acid sequence with not more than 1, 2, 3 or 4 modifications, optionally substitutions, additions or deletions thereof.

[0073] In some embodiments, the anti-TCRβV antibody molecule comprises an antigen binding domain comprising:

[0074] a variable heavy chain (VH) of an amino acid sequence listed in Table 1, optionally SEQ ID NO: 9 or SEQ ID NO: 1312, or a sequence having at least about 85%, 90%, 95%, or 99% sequence identity to an amino acid sequence listed in Table 1, optionally SEQ ID NO: 9 or SEQ ID NO: 1312; and/or

[0075] a variable light chain (VL) of an amino acid sequence listed in Table 1, optionally SEQ ID NO: 10 or SEQ ID NO: 11 or SEQ ID NO: 1314, or a sequence having at least about 85%, 90%, 95%, or 99% sequence identity to an amino acid sequence listed in Table 1, optionally SEQ ID NO: 10 or SEQ ID NO: 11 or SEQ ID NO: 1314.

[0076] In some embodiments, the anti-TCRβV antibody molecule comprises an antigen binding domain comprising:

[0077] (i) the VH amino acid sequence of SEQ ID NO: 9 or SEQ ID NO: 1312;

[0078] (ii) an amino acid sequence having at least about 85%, 90%, 95%, or 99% sequence identity to the amino acid sequence of SEQ ID NO: 9 or SEQ ID NO: 1312;

[0079] (iii) the VL amino acid sequence of SEQ ID NO: 10 or SEQ ID NO: 1314; and/or

[0080] (iv) an amino acid sequence having at least about 85%, 90%, 95%, or 99% sequence identity to the amino acid sequence of SEQ ID NO: 10 or SEQ ID NO: 1314.

[0081] In some embodiments, the anti-TCRβV antibody molecule comprises an antigen binding domain comprising:

[0082] (i) the VH amino acid sequence of SEQ ID NO: 9 or SEQ ID NO: 1312;

[0083] (ii) an amino acid sequence having at least about 85%, 90%, 95%, or 99% sequence identity to the amino acid sequence of SEQ ID NO: 9 or SEQ ID NO: 1312;

[0084] (iii) the VL amino acid sequence of SEQ ID NO: 11 or SEQ ID NO: 1314; and/or

[0085] (iv) an amino acid sequence having at least about 85%, 90%, 95%, or 99% sequence identity to the amino acid sequence of SEQ ID NO: 11 or SEQ ID NO: 1314.

[0086] In some embodiments, the anti-TCRβV antibody molecule comprises a heavy chain comprising a framework region, optionally framework region 3 (FR3), comprising one or both of:

[0087] (i) a Threonine at position 73, optionally a substitution at position 73 according to Kabat numbering, optionally a Glutamic Acid to Threonine substitution; or

[0088] (ii) a Glycine a position 94, optionally a substitution at position 94 according to Kabat numbering, optionally a Arginine to Glycine substitution;

[0089] wherein the substitution is relative to a human germline heavy chain framework region sequence.

[0090] In some embodiments, the anti-TCRβV antibody molecule comprises a light chain comprising a framework region, optionally framework region 1 (FR1), comprising a Phenyalanine at position 10, optionally a substitution at position 10 according to Kabat numbering, optionally a Serine to Phenyalanine substitution, wherein the substitution is relative to a human germline light chain framework region sequence.

[0091] In some embodiments, the anti-TCRβV antibody molecule comprises a light chain comprising a framework region, optionally framework region 2 (FR2), comprising one or both of:

[0092] (i) a Histidine at position 36, optionally a substitution at position 36 according to Kabat numbering, optionally a Tyrosine to Histidine substitution; or

[0093] (ii) an Alanine at position 46, optionally a substitution at position 46 according to Kabat numbering, optionally a Arginine to Alanine substitution;

[0094] wherein the substitution is relative to a human germline light chain framework region sequence.

[0095] In some embodiments, the anti-TCRβV antibody molecule comprises a light chain comprising a framework region, optionally framework region 3 (FR3), comprising a Phenyalanine at position 87, optionally a substitution at position 87 according to Kabat numbering, optionally a Tyrosine to Phenyalanine substitution, wherein the substitution is relative to a human germline light chain framework region sequence.

[0096] In another aspect, provided herein is an antibody molecule which binds, optionally specifically binds, to a T cell receptor beta variable chain (TCRβV) region, wherein the anti-TCRβV antibody molecule comprises an antigen binding domain comprising:

[0097] (a) a light chain variable region (VL) comprising:

[0098] (i) one, two or all of, optionally three, a light chain complementarity determining region 1 (LC CDR1), a light chain complementarity determining region 2 (LC CDR2), and a light chain complementarity determining region 3 (LC CDR3) of a humanized B-H light chain (LC) of Table 2; and

[0099] (ii) a framework region (FR) having at least 95% identity with one, two, three or all, optionally four, of a framework region 1 (FR1), a framework region 2 (FR2), a framework region 3 (FR3), and a framework region 4 (FR4) of a humanized B-H LC of Table 2; and/or

[0100] (b) a heavy chain variable region (VH) comprising:

[0101] (i) one, two or all of, optionally three, a heavy chain complementarity determining region 1 (HC CDR1), a heavy chain complementarity determining region 2 (HC CDR2) and a heavy chain complementarity determining region 3 (HC CDR3) of a humanized B-H heavy chain (HC) of Table 2; and

[0102] (ii) a framework region (FR) having at least 95% identity with one, two, three or all, optionally four, of a framework region 1 (FR1), a framework region 2 (FR2), a framework region 3 (FR3), and a framework region 4 (FR4) of a humanized B-H HC of Table 2.

[0103] In some embodiments, the anti-TCRβV antibody molecule as provided herein binds to TCRβ V12, optionally TCRβ V12-4*01, TCRβ V12-3*01, or TCRβ V12-5*01, or a variant thereof.

[0104] In some embodiments, the anti-TCRβV antibody molecule comprises an antigen binding domain comprising:

[0105] (i) a HC CDR1, a HC CDR2 and a HC CDR3 of Antibody B-H listed in Table 2; or

[0106] (ii) a LC CDR1, a LC CDR2, and a LC CDR3 of Antibody B-H listed in Table 2.

[0107] In some embodiments, the anti-TCRβV antibody molecule comprises an antigen binding domain comprising a light chain variable region (VL) comprising one, two or all, optionally three, of a LC CDR1, a LC CDR2 and a LC CDR3 of SEQ ID NO: 2, SEQ ID NO: 10 or SEQ ID NO: 11, or an amino acid sequence listed in Table 1.

[0108] In some embodiments, the anti-TCRβV antibody molecule comprises an antigen binding domain comprising a heavy chain variable region (VH) comprising one, two or all, optionally three, of a HC CDR1, a HC CDR2 and a HC CDR3 of a humanized Antibody B-H listed in Table 2.

[0109] In some embodiments, the anti-TCRβV antibody molecule comprises an antigen binding domain comprising a light chain variable region (VL) comprising one, two or all, optionally three, of a LC CDR1, a LC CDR2 and a LC CDR3 of a humanized Antibody B-H listed in Table 2.

[0110] In some embodiments, the anti-TCRβV antibody molecule comprises:

[0111] a VH sequence of a humanized Antibody B-H listed in Table 2, or a sequence having at least about 85%, 90%, 95%, or 99% sequence identity to a VH of a humanized Antibody B-H listed in Table 2; and/or

[0112] a VL sequence of a humanized Antibody B-H listed in Table 2, or a sequence having at least about 85%, 90%, 95%, or 99% sequence identity to a VL of a humanized Antibody B-H listed in Table 2.

[0113] In some embodiments, the anti-TCRβV antibody molecule comprises a framework region (FR) having at least 95% identity with one of: a FR1, a FR2, a FR3, and a FR4 of a humanized B-H LC of Table 2.

[0114] In some embodiments, the anti-TCRβV antibody molecule comprises a framework region (FR) having at least 95% identity with any two of: a FR1, a FR2, a FR3, and a FR4 of a humanized B-H LC of Table 2.

[0115] In some embodiments, the anti-TCRβV antibody molecule comprises a framework region (FR) having at least 95% identity with any three of: a FR1, a FR2, a FR3, and a FR4 of a humanized B-H LC of Table 2.

[0116] In some embodiments, the anti-TCRβV antibody molecule comprises a framework region (FR) having at least 95% identity with all of: a FR1, a FR2, a FR3, and a FR4 of a humanized B-H LC of Table 2.

[0117] In some embodiments, the anti-TCRβV antibody molecule comprises a framework region (FR) having at least 95% identity with one of: a FR1, a FR2, a FR3, and a FR4 of a humanized B-H HC of Table 2.

[0118] In some embodiments, the anti-TCRβV antibody molecule comprises a framework region (FR) having at least 95% identity with any two of: a FR1, a FR2, a FR3, and a FR4 of a humanized B-H HC of Table 2.

[0119] In some embodiments, the anti-TCRβV antibody molecule comprises a framework region (FR) having at least 95% identity with any three of: a FR1, a FR2, a FR3, and a FR4 of a humanized B-H HC of Table 2.

[0120] In some embodiments, the anti-TCRβV antibody molecule comprises a framework region (FR) having at least 95% identity with all of: a FR1, a FR2, a FR3, and a FR4 of a humanized B-H HC of Table 2.

[0121] In some embodiments, binding of the anti-TCRβV antibody molecule to the TCRβV region results in a cytokine profile that differs from a cytokine profile of a T cell engager that binds to a receptor or molecule other than a TCRβV region (“a non-TCRβV-binding T cell engager”).

[0122] In some embodiments, the non-TCRβV-binding T cell engager comprises an antibody that binds to a CD3 molecule, optionally CD3 epsilon (CD3e) molecule; or a TCR alpha (TCRα) molecule.

[0123] In some embodiments, the cytokine profile of the first moiety comprises, one, two, three, four, five, six, seven, or all of the following:

[0124] (i) increased level, optionally expression level, and/or activity of IL-2;

[0125] (ii) reduced level, optionally expression level, and/or activity of IL-1β;

[0126] (iii) reduced level, optionally expression level, and/or activity of IL-6;

[0127] (iv) reduced level, optionally expression level, and/or activity of TNFα;

[0128] (v) reduced level, optionally expression level, and/or activity of IL-10;

[0129] (vi) a delay, optionally at least 1, 2, 3, 4, 5, 6, 7, 8, 9, 10 or more hours delay, in increased level, optionally expression level, and/or activity of IL-2;

[0130] (vii) a delay, optionally at least 1, 2, 3, 4, 5, 6, 7, 8, 9, 10 hours delay, in increased level, optionally expression level, and/or activity of IFNg; or

[0131] (viii) increased level, optionally expression level, and/or activity of IL-15, optionally wherein (i)-(vii) are relative to the cytokine profile of the non-TCRβV-binding T cell engager.

[0132] In some embodiments, binding of the anti-TCRβV antibody molecule to the TCRβV region results in reduced cytokine storm, optionally reduced cytokine release syndrome (CRS), as measured by an assay of Example 3, optionally relative to the cytokine storm induced by the non-TCRβV-binding T cell engager.

[0133] In some embodiments, binding of the anti-TCRβV antibody molecule to the TCRβV region results in one, two, three or all of:

[0134] (ix) reduced T cell proliferation kinetics;

[0135] (x) cell killing, optionally target cell killing, optionally cancer cell killing, optionally as measured by an assay of Example 4;

[0136] (xi) increased Natural Killer (NK) cell proliferation, optionally expansion; or

[0137] (xii) expansion, optionally at least about 1.1-10 fold expansion, optionally at least about 1.1, 1.2, 1.3, 1.4, 1.5, 2, 3, 4, 5, 6, 7, 8, 9, or 10 fold expansion, of a population of T cells having a memory-like phenotype,

[0138] optionally relative to the non-TCRβV-binding T cell engager.

[0139] In some embodiments, the population of T cells having a memory-like phenotype comprises CD45RA+ CCR7− T cells, optionally CD4+ and/or CD8+ T cells.

[0140] In some embodiments, binding of the anti-TCRβV antibody molecule to a TCRβV region results in a reduction of at least 2, 5, 10, 20, 50, 100, or 200 fold, or at least 2-200 fold, optionally 5-150, 10-100, 20-50 fold, in the expression level and or activity of IL-10 as measured by an assay of Example 3.

[0141] In some embodiments, binding of the anti-TCRβV antibody molecule to a TCRβV region results in a reduction of at least 2, 5, 10, 20, 50, 100, 200, 300, 400, 500, 600, 700, 800, 900, or 1000 fold, or at least 2-1000 fold, optionally 5-900, 10-800, 20-700, 50-600, 100-500, or 200-400 fold, in the expression level and or activity of IL-6 as measured by an assay of Example 3.

[0142] In some embodiments, binding of the anti-TCRβV antibody molecule to a TCRβV region results in a reduction of at least 2, 5, 10, 20, 50, 100, 200, 300, 400, 500, 600, 700, 800, 900, 1000, or 2000 fold, or at least 2-2000 fold, optionally 5-1000, 10-900, 20-800, 50-700, 100-600, 200-500, or 300-400 fold, in the expression level and or activity of TNFα as measured by an assay of Example 3.

[0143] In some embodiments, binding of the anti-TCRβV antibody molecule to a TCRβV region results in an increase of at least 2, 5, 10, 20, 50, 100, 200, 300, 400, 500, 600, 700, 800, 900, 1000, or 2000 fold, or at least 2-2000 fold, optionally 5-1000, 10-900, 20-800, 50-700, 100-600, 200-500, or 300-400 fold, in the expression level and or activity of IL-2 as measured by an assay of Example 3.

[0144] In some embodiments, the anti-TCRβV antibody molecule comprises an antigen binding domain comprising a single chain Fv (scFv) or a Fab.

[0145] In some embodiments, the anti-TCRβV antibody molecule binds to a conformational or a linear epitope on the T cell.

[0146] In some embodiments, the anti-TCRβV antibody molecule is a full antibody, optionally an antibody that includes at least one, and preferably two, complete heavy chains, and at least one, and preferably two, complete light chains, or an antigen-binding fragment, optionally a Fab, F(ab′)2, Fv, a single chain Fv fragment, a single domain antibody, a diabody (dAb), a bivalent antibody, or bispecific antibody or fragment thereof, a single domain variant thereof, or a camelid antibody.

[0147] In some embodiments, the anti-TCRβV antibody molecule comprises one or more heavy chain constant regions chosen from IgG1, IgG2, IgG3, IgGA1, IgGA2, IgG4, IgJ, IgM, IgD, or IgE, or a fragment thereof, optionally as described in Table 3.

[0148] In some embodiments, the anti-TCRβV antibody molecule comprises a heavy chain constant region of an IgM or a fragment thereof, optionally wherein the IgM heavy chain constant region comprises the sequence of SEQ ID NO: 73, or a sequence with at least 85%, 90%, 95%, or 99% sequence identity thereto.

[0149] In some embodiments, the anti-TCRβV antibody molecule comprises a heavy chain constant region of an IgJ or a fragment thereof, optionally wherein the IgJ heavy chain constant region comprises the sequence of SEQ ID NO: 76 or a sequence with at least 85%, 90%, 95%, or 99% sequence identity thereto.

[0150] In some embodiments, the anti-TCRβV antibody molecule comprises a heavy chain constant region of an IgGA1, or a fragment thereof, optionally wherein the IgGA1 heavy chain constant region comprises the sequence of SEQ ID NO: 74, or a sequence with at least 85%, 90%, 95%, or 99% sequence identity thereto.

[0151] In some embodiments, the anti-TCRβV antibody molecule comprises a heavy chain constant region of an IgGA2, or a fragment thereof, optionally wherein the IgGA2 heavy chain constant region comprises a sequence listed in Table 3, optionally SEQ ID NO: 75, or a sequence with at least 85%, 90%, 95%, or 99% sequence identity thereto.

[0152] In some embodiments, the anti-TCRβV antibody molecule comprises a light chain constant region chosen from the light chain constant regions of kappa or lambda, or a fragment thereof, optionally as described in Table 3.

[0153] In some embodiments, the anti-TCRβV antibody molecule comprises a light chain constant region of a kappa chain, or a fragment thereof, optionally wherein the kappa chain constant region comprises the sequence of SEQ ID NO: 39, or a sequence with at least 85%, 90%, 95%, or 99% sequence identity thereto.

[0154] In some embodiments, the anti-TCRβV antibody molecule comprises:

[0155] (i) one or more heavy chain constant regions comprising a heavy chain constant region chosen from IgG1, IgG2, IgG3, IgGA1, IgGA2, IgG4, IgJ, IgM, IgD, or IgE, or a fragment thereof, optionally as described in Table 3; and

[0156] (ii) a light chain constant region comprising a light chain constant region chosen from the light chain constant regions of kappa or lambda, or a fragment thereof, optionally as described in Table 3.

[0157] In some embodiments, the anti-TCRβV antibody molecule comprises:

[0158] (i) a heavy chain constant region comprising:

[0159] (a) an IgM heavy chain constant region or a fragment thereof, comprising the sequence of SEQ ID NO: 73, or a sequence with at least 85%, 90%, 95%, or 99% sequence identity thereto;

[0160] (b) an IgGA1 heavy chain constant region or a fragment thereof, comprising the sequence of SEQ ID NO: 74, or a sequence with at least 85%, 90%, 95%, or 99% sequence identity thereto; or

[0161] (c) an IgGA2 heavy chain constant region or a fragment thereof, comprising the sequence of SEQ ID NO: 75, or a sequence with at least 85%, 90%, 95%, or 99% sequence identity thereto; and

[0162] (ii) a light chain constant region comprising a kappa chain constant region comprising the sequence of SEQ ID NO: 39, or a sequence with at least 85%, 90%, 95%, or 99% sequence identity thereto, optionally wherein, the anti-TCRβV antibody molecule further comprises an IgJ heavy chain constant region or a fragment thereof, wherein the IgJ heavy chain constant region comprises the sequence of SEQ ID NO: 76 or a sequence with at least 85%, 90%, 95%, or 99% sequence identity thereto.

[0163] In some embodiments, the second moiety is a tumor-targeting moiety.

[0164] In some embodiments, the second moiety is a cytokine molecule.

[0165] In some embodiments, the second moiety is a stromal modifying moiety.

[0166] In some embodiments, the second moiety is an anti-TCRβV antibody molecule other than the first moiety.

[0167] In some embodiments, the first and/or second moiety binds to and activates an immune cell, optionally an effector cell.

[0168] In some embodiments, the first and/or second moiety binds to, but does not activate an immune cell, optionally an effector cell.

[0169] In some embodiments, the second moiety is chosen from an NK cell engager, a T cell engager other than an anti-TCRβV antibody molecule, a B cell engager, a dendritic cell engager, or a macrophage cell engager, or a combination thereof.

[0170] In some embodiments, the tumor-targeting moiety comprises an antibody molecule, optionally Fab or scFv, a receptor molecule, optionally a receptor, a receptor fragment or functional variant thereof, or a ligand molecule, optionally a ligand, a ligand fragment or functional variant thereof, or a combination thereof, that binds to a cancer antigen.

[0171] In some embodiments, the tumor-targeting moiety binds to a cancer antigen present on a cancer, optionally a hematological cancer, a solid tumor, a metastatic cancer, soft tissue tumor, metastatic lesion, or a combination thereof.

[0172] In some embodiments, the cancer antigen is a tumor antigen or stromal antigen, or a hematological antigen.

[0173] In some embodiments, the cancer antigen is chosen from: BCMA, CD19, CD20, CD22, FcRH5, PDL1, CD47, gangloside 2 (GD2), prostate stem cell antigen (PSCA), prostate specific membrane antigen (PMSA), prostate-specific antigen (PSA), carcinoembryonic antigen (CEA), Ron Kinase, c-Met, Immature laminin receptor, TAG-72, BING-4, Calcium-activated chloride channel 2, Cyclin-B1, 9D7, Ep-CAM, EphA3, Her2/neu, Telomerase, SAP-1, Survivin, NY-ESO-1/LAGE-1, PRAME, SSX-2, Melan-A/MART-1, Gp100/pme117, Tyrosinase, TRP-1/-2, MC1R, β-catenin, BRCA1/2, CDK4, CML66, Fibronectin, p53, Ras, TGF-B receptor, AFP, ETA, MAGE, MUC-1, CA-125, BAGE, GAGE, NY-ESO-1, β-catenin, CDK4, CDC27, α actinin-4, TRP1/gp75, TRP2, gp100, Melan-A/MART1, gangliosides, WT1, EphA3, Epidermal growth factor receptor (EGFR), MART-2, MART-1, MUC1, MUC2, MUM1, MUM2, MUM3, NA88-1, NPM, A1, OGT, RCC, RUI1, RUI2, SAGE, TRG, TRP1, TSTA, Folate receptor alpha, L1-CAM, CAIX, gpA33, GD3, GM2, VEGFR, Integrins (Integrin alphaVbeta3, Integrin alpha5Beta1), Carbohydrates (Le), IGF1R, EPHA3, TRAILR1, TRAILR2, RANKL, (FAP), TGF-beta, hyaluronic acid, collagen, optionally collagen IV, tenascin C, or tenascin W.

[0174] In some embodiments, the tumor-targeting moiety is a BCMA targeting moiety or a FcRH5 targeting moiety.

[0175] In some embodiments, the cancer is a solid tumor including but not limited to: pancreatic, optionally pancreatic adenocarcinoma, cancer, breast cancer, colorectal cancer, lung cancer, optionally small or non-small cell lung cancer, skin cancer, ovarian cancer, or liver cancer.

[0176] In some embodiments, the cancer is a hematological cancer including, but not limited to: a B-cell or T cell malignancy, optionally Hodgkin's lymphoma, Non-Hodgkin's lymphoma, optionally B cell lymphoma, diffuse large B cell lymphoma, follicular lymphoma, chronic lymphocytic leukemia, mantle cell lymphoma, marginal zone B-cell lymphoma, Burkitt lymphoma, lymphoplasmacytic lymphoma, hairy cell leukemia, acute myeloid leukemia (AML), chronic myeloid leukemia, myelodysplastic syndrome, multiple myeloma, and acute lymphocytic leukemia.

[0177] In some embodiments, the cytokine molecule is chosen from interleukin-2 (IL-2), interleukin-7 (IL-7), interleukin-12 (IL-12), interleukin-15 (IL-15), interleukin-18 (IL-18), interleukin-21 (IL-21), or interferon gamma, or a fragment, variant or combination thereof.

[0178] In some embodiments, the cytokine molecule is a monomer or a dimer.

[0179] In some embodiments, the cytokine molecule further comprises a receptor dimerizing domain, optionally an IL15Ralpha dimerizing domain.

[0180] In some embodiments, the cytokine molecule, optionally IL-15) and the receptor dimerizing domain, optionally an IL15Ralpha dimerizing domain, are not covalently linked, optionally are non-covalently associated.

[0181] In some embodiments, the multispecific molecule as provided herein further comprises an immunoglobulin constant region, optionally Fc region, chosen from the heavy chain constant regions of IgG1, IgG2, IgG3, IgGA1, IgGA2, IgG4, IgJ, IgM, IgD, or IgE, or a fragment thereof, optionally wherein, the heavy chain constant region comprises the heavy chain constant region of human IgG1, IgG2 or IgG4.

[0182] In some embodiments, the immunoglobulin constant region, optionally an Fc region, is linked, optionally covalently linked to, one or more of tumor-targeting moiety, the cytokine molecule, or the stromal modifying moiety.

[0183] In some embodiments, an interface of a first and second immunoglobulin chain constant regions, optionally Fc region, is altered, optionally mutated, to increase or decrease dimerization, optionally relative to a non-engineered interface.

[0184] In some embodiments, the dimerization of the immunoglobulin chain constant region, optionally Fc region, is enhanced by providing an Fc interface of a first and a second Fc region with one or more of: a paired cavity-protuberance (“knob-in-a hole”), an electrostatic interaction, or a strand-exchange, such that a greater ratio of heteromultimer:homomultimer forms, optionally relative to a non-engineered interface.

[0185] In some embodiments, the multispecific molecule as provided herein further comprises a linker, optionally a linker described herein, optionally wherein the linker is selected from: a cleavable linker, a non-cleavable linker, a peptide linker, a flexible linker, a rigid linker, a helical linker, or a non-helical linker.

[0186] In another aspect, provided herein is an isolated nucleic acid molecule comprising a nucleotide sequence encoding the anti-TCRβV antibody molecule as provided herein, or a nucleotide sequence having at least 75%, 80%, 85%, 90%, 95%, or 99% identity thereto.

[0187] In another aspect, provided herein is an isolated nucleic acid molecule comprising a nucleotide sequence encoding the multispecific molecule as provided herein, or a nucleotide sequence having at least 75%, 80%, 85%, 90%, 95%, or 99% identity thereto.

[0188] In another aspect, provided herein is a vector, optionally an expression vector, comprising one or more of the nucleic acid molecules as provided herein.

[0189] In another aspect, provided herein is a cell, optionally host cell, comprising the nucleic acid molecule as provided herein, or the vector as provided herein.

[0190] In another aspect, provided herein is a method of making, optionally producing or manufacturing, the anti-TCRβV antibody molecule as provided herein, or the multispecific molecule as provided herein, comprising culturing the host cell as provided herein, under suitable conditions, optionally conditions suitable expression of the anti-TCRβV antibody molecule or the multispecific molecule.

[0191] In another aspect, provided herein is a pharmaceutical composition comprising the anti-TCRβV antibody molecule as provided herein, or the multispecific molecule as provided herein, and a pharmaceutically acceptable carrier, excipient, or stabilizer.

[0192] In another aspect, provided herein is a method of modulating, optionally enhancing, an immune response in a subject comprising administering to the subject an effective amount of an antibody molecule which binds, optionally specifically binds, to a T cell receptor beta variable region (TCRβV) (“anti-TCRβV antibody molecule”).

[0193] In another aspect, provided herein is a method of modulating, optionally enhancing, an immune response in a subject comprising administering to the subject an effective amount of the multispecific molecule as provided herein.

[0194] In some embodiments, the method comprises expanding, optionally increasing the number of, an immune cell population in the subject.

[0195] In another aspect, provided herein is a method of expanding, optionally increasing the number of, an immune cell population comprising, contacting the immune cell population with an effective amount of an antibody molecule which binds, optionally specifically binds, to a T cell receptor beta variable region (TCRβV) (“anti-TCRβV antibody molecule”).

[0196] In another aspect, provided herein is a method of expanding, optionally increasing the number of, an immune cell population comprising, contacting the immune cell population with an effective amount of the multispecific molecule as provided herein.

[0197] In some embodiments, the expansion occurs in vivo or ex vivo, optionally in vitro.

[0198] In some embodiments, the immune cell population comprises a TCRβV expressing cell, optionally a TCRβV+ cell.

[0199] In some embodiments, the TCRβV expressing cell is a T cell, optionally a CD8+ T cell, a CD3+ T cell or a CD4+ T cell.

[0200] In some embodiments, the immune cell population comprises a T cell, optionally a CD4 T cell, a CD8 T cell, optionally an effector T cell, a T cell having a memory-like phenotype or a memory T cell, optionally a memory effector T cell, optionally TEM cell, optionally TEMRA cell, or a tumor infiltrating lymphocyte (TIL).

[0201] In some embodiments, the immune cell population comprises a T cell, a Natural Killer cell, a B cell, or a myeloid cell.

[0202] In some embodiments, the immune cell population is obtained from a healthy subject.

[0203] In some embodiments, the immune cell population is obtained from a subject, optionally from an apheresis sample from the subject, having a disease, optionally a cancer, optionally as described herein, optionally wherein the immune cell population comprises a tumor infiltrating lymphocyte (TIL).

[0204] In some embodiments, the method results in an expansion of at least 1.1-10 fold, optionally at least 1.1, 1.2, 1.3, 1.4, 1.5, 2, 3, 4, 5, 6, 7, 8, 9, or 10 fold expansion.

[0205] In some embodiments, the method as provided herein further comprises contacting the population of cells with an agent that promotes, optionally increases, immune cell expansion.

[0206] In some embodiments, the method as provided herein further comprises contacting the population of cells with an immune checkpoint inhibitor, optionally a PD-1 inhibitor.

[0207] In some embodiments, the method as provided herein further comprises contacting the population of cells with a 4-1BB (CD127) agonist, optionally an anti-4-1BB antibody.

[0208] In some embodiments, the method as provided herein further comprises contacting the population of cells with a non-dividing population of cells, optionally feeder cells, optionally irradiated allogenic human PBMCs.

[0209] In some embodiments, the population of cells is expanded in an appropriate media, optionally media described herein, that includes one or more cytokines, optionally IL-2, IL-7, IL-15, or a combination thereof.

[0210] In some embodiments, the population of cells is expanded for a period of at least about 4 hours, 6 hours, 10 hours, 12 hours, 15 hours, 18 hours, 20 hours, or 22 hours, or for at least 1, 2, 3, 4, 5, 6, 7, 8, 9, 10, 11, 12, 13, 14, 15, 1, 6 17, 18, 19, 20 or 21 days, or for at least about 1 week, 2 weeks, 3 weeks, 4 weeks, 5 weeks, 6 weeks, 7 weeks or 8 weeks.

[0211] In some embodiments, expansion of the population of immune cells, is compared to expansion of a similar population of cells with an antibody that binds to: a CD3 molecule, optionally CD3 epsilon (CD3e) molecule; or a TCR alpha (TCRα) molecule.

[0212] In some embodiments, expansion of the population of immune cells, is compared to expansion of a similar population of cells not contacted with the anti-TCRβV antibody molecule, or multispecific molecule comprising the anti-TCRβV antibody molecule.

[0213] In some embodiments, expansion of the population of T cells having a memory-like phenotype, optionally CD45RA+ CCR7− cells, optionally memory effector T cells, optionally TEM cells, optionally TEMRA cells, is compared to expansion of a similar population of cells with an antibody that binds to: a CD3 molecule, optionally CD3 epsilon (CD3e) molecule; or a TCR alpha (TCRα) molecule.

[0214] In some embodiments, the population of expanded T cells having a memory-like phenotype, optionally effector memory cells, comprises cells which:

[0215] (i) have a detectable level of CD45RA, optionally express or re-express CD45RA;

[0216] (ii) have low or no expression of CCR7; and/or

[0217] (iii) have a detectable level of CD95, optionally express CD95, optionally a population of CD45RA+, CCR7−, CD95+ T cells, optionally wherein the T cells comprise CD3+, CD4+ or CD8+ T cells.

[0218] In some embodiments, the method results in expansion of, optionally selective or preferential expansion of, T cells expressing a T cell receptor (TCR) comprising a TCR alpha and/or TCR beta molecule, optionally TCR alpha-beta T cells (αβ T cells).

[0219] In some embodiments, the method results in expansion of αβT cells over expansion of T cells expressing a TCR comprising a TCR gamma and/or TCR delta molecule, optionally TCR gamma-delta T cells (γδ T cells).

[0220] In another aspect, provided herein is a method of treating a disease, optionally cancer, in a subject comprising administering to the subject an effective amount of an antibody molecule which binds, optionally specifically binds, to a T cell receptor beta variable region (TCRβV) (“anti-TCRβV antibody molecule”), thereby treating the cancer.

[0221] In another aspect, provided herein is a composition comprising an antibody molecule which binds, optionally specifically binds, to a T cell receptor beta variable region (TCRβV) (“anti-TCRβV antibody molecule”), for use in treating a disease, optionally cancer, in a subject.

[0222] In another aspect, provided herein is a composition comprising an antibody molecule which binds, optionally specifically binds, to a T cell receptor beta variable region (TCRβV) (“anti-TCRβV antibody molecule”), for use in the manufacture of a medicament for treating a disease, optionally cancer, in a subject.

[0223] In another aspect, provided herein is a method of treating a disease, optionally cancer, in a subject comprising administering to the subject an effective amount of the multispecific molecule as provided herein, thereby treating the cancer.

[0224] In another aspect, provided herein is a composition comprising the multispecific molecule as provided herein, for use in treating a disease, optionally cancer, in a subject.

[0225] In another aspect, provided herein is a composition comprising the multispecific molecule as provided herein, for use in the manufacture of a medicament for treating a disease, optionally cancer, in a subject.

[0226] In another aspect, provided herein is a method of treating, optionally preventing or reducing, cytokine release syndrome (CRS) and/or neurotoxicity (NT) in a subject, optionally CRS and/or NT associated with a treatment, optionally a previously administered treatment, comprising administering to the subject an effective amount of an antibody molecule which binds, optionally specifically binds, to a T cell receptor beta variable region (TCRβV) (“anti-TCRβV antibody molecule”), thereby preventing CRS and/or NT in the subject.

[0227] In another aspect, provided herein is a method of treating, optionally preventing or reducing, cytokine release syndrome (CRS) and/or neurotoxicity (NT) in a subject, optionally CRS and/or NT associated with a treatment, optionally a previously administered treatment, comprising administering to the subject an effective amount the multispecific molecule as provided herein, thereby preventing CRS and/or NT in the subject.

[0228] In another aspect, provided herein is a method of targeting a therapy, optionally treatment, to a T cell in a subject having a disease, optionally cancer, comprising administering an effective amount of:

[0229] (i) an antibody molecule which binds, optionally specifically binds, to a T cell receptor beta variable region (TCRβV) (“anti-TCRβV antibody molecule”); and

[0230] (ii) the therapy, optionally a tumor targeting therapy, optionally an antibody that binds to a cancer antigen, optionally as described herein, thereby targeting the therapy to the T cell in the subject.

[0231] In another aspect, provided herein is a method of targeting a therapy, optionally treatment, to a T cell in a subject having a disease, optionally cancer, comprising administering an effective amount of:

[0232] (i) the multispecific molecule as provided herein; and

[0233] (ii) the therapy, optionally a tumor targeting therapy, optionally an antibody that binds to a cancer antigen, optionally as described herein, thereby targeting the therapy to the T cell in the subject.

[0234] In some embodiments, the method results in: reduced cytokine release syndrome (CRS), optionally lesser duration of CRS or no CRS, or a reduced severity of CRS, optionally absence of severe CRS, optionally CRS grade 4 or 5, compared to administration of (ii) alone.

[0235] In some embodiments, the anti-TCRβV antibody or the multispecific molecule is administered concurrently with or after the administration of the treatment associated with CRS.

[0236] In another aspect, provided herein is a method of treating a subject having a cancer, the method comprising:

[0237] acquiring a value of the status of a TCRβV subfamily for the subject, wherein said value comprises a measure of the presence of, optionally level or activity of, a TCRβV molecule in a sample from the subject, and

[0238] administering an effective amount of an antibody molecule which binds, optionally specifically binds, to a T cell receptor beta variable region (TCRβV) (“anti-TCRβV antibody molecule”); to the subject,

[0239] thereby treating the subject.

[0240] In another aspect, provided herein is a method of treating a subject having a cancer, the method comprising:

[0241] acquiring a value of the status of a TCRβV subfamily for the subject, wherein said value comprises a measure of the presence of, optionally level or activity of, a TCRβV molecule in a sample from the subject, and

[0242] administering an effective amount of the multispecific molecule as provided herein to the subject, thereby treating the subject.

[0243] In another aspect, provided herein is a method of treating a subject having a cancer, the method comprising administering an effective amount of an antibody molecule which binds, optionally specifically binds, to a T cell receptor beta variable region (TCRβV) (“anti-TCRβV antibody molecule”) to the subject, wherein the subject has a higher, optionally increased, level or activity of one or more TCRβV subfamilies, optionally as described herein, compared to a reference level or activity of one or more TCRβV subfamilies, optionally in a healthy subject, optionally a subject not having a cancer.

[0244] In another aspect, provided herein is a method of treating a subject having a cancer, the method comprising administering an effective amount of the multispecific molecule as provided herein to the subject, wherein the subject has a higher, optionally increased, level or activity of one or more TCRβV subfamilies, optionally as described herein, compared to a reference level or activity of one or more TCRβV subfamilies, optionally in a healthy subject, optionally a subject not having a cancer.

[0245] In another aspect, provided herein is a method of expanding a population of immune effector cells from a subject having a cancer, the method comprising:

[0246] (i) isolating a biological sample comprising a population of immune effector cells from the subject; optionally a peripheral blood sample, biopsy sample, or bone marrow sample;

[0247] (ii) acquiring a value of the status of one or more TCRβV subfamilies for the subject, optionally in the biological sample from the subject, wherein said value comprises a measure of the presence of, optionally level or activity of, a TCRβV subfamily in a sample from the subject compared to a reference value, optionally a sample from a health subject, wherein a value that is higher, optionally increased, in the subject relative to the reference, optionally healthy subject, is indicative of the presence of cancer in the subject, and

[0248] (iii) contacting the biological sample comprising a population of immune effector cells with an anti-TCRβV antibody molecule, optionally as described herein.

[0249] In some embodiments, the method as provided herein further comprises administering the population of immune effector cells contacted with the anti-TCRβV antibody molecule to the subject.

[0250] In another aspect, provided herein is a method of expanding a population of immune effector cells from a subject having a cancer, the method comprising:

[0251] (i) isolating a biological sample comprising a population of immune effector cells from the subject; optionally a peripheral blood sample, biopsy sample, or bone marrow sample;

[0252] (ii) acquiring a value of the status of one or more TCRβV subfamilies for the subject, optionally in the biological sample from the subject, wherein said value comprises a measure of the presence of, optionally level or activity of, a TCRβV subfamily in a sample from the subject compared to a reference value, optionally a sample from a health subject, wherein a value that is higher, optionally increased, in the subject relative to the reference, optionally healthy subject, is indicative of the presence of cancer in the subject, and

[0253] (iii) contacting the biological sample comprising a population of immune effector cells with the multispecific molecule as provided herein.

[0254] In some embodiments, the method as provided herein further comprises administering the population of immune effector cells contacted with the multispecific molecule to the subject.

[0255] In some embodiments, the method as provided herein comprises measuring T cell function, optionally cytotoxic activity, cytokine secretion, or degranulation, in the population of immune effector cells, optionally compared to a reference population, optionally an otherwise similar population not contacted with the anti-TCRβV antibody molecule or a population of immune effector cells obtained from a healthy subject, optionally a subject that does not have a cancer.

[0256] In some embodiments, the biological sample comprising the population of immune effector cells is contacted with an anti-TCRβV antibody molecule or a multispecific molecule that binds to the one or more TCRβV subfamilies, optionally the same TCRβV subfamily, identified as being higher, optionally increased, in the biological sample.

[0257] In some embodiments, the biological sample comprising the population of immune effector cells is contacted with an anti-TCRβV antibody molecule or a multispecific molecule that does not bind to the one or more TCRβV subfamilies, optionally a different TCRβV subfamily, identified as being higher, optionally increased, in the biological sample.

[0258] In some embodiments, the cancer is a solid tumor including but not limited to: melanoma, pancreatic, optionally pancreatic adenocarcinoma, cancer, breast cancer, colorectal cancer (CRC), lung cancer, optionally small or non-small cell lung cancer, skin cancer, ovarian cancer, or liver cancer.

[0259] In some embodiments, the cancer is a hematological cancer including, but not limited to: a B-cell or T cell malignancy, optionally Hodgkin's lymphoma, Non-Hodgkin's lymphoma, optionally B cell lymphoma, diffuse large B cell lymphoma (DLBCL), follicular lymphoma, chronic lymphocytic leukemia (B-CLL), mantle cell lymphoma, marginal zone B-cell lymphoma, Burkitt lymphoma, lymphoplasmacytic lymphoma, or hairy cell leukemia, acute myeloid leukemia (AML), chronic myeloid leukemia, myelodysplastic syndrome, multiple myeloma, and acute lymphocytic leukemia.

[0260] In some embodiments, the cancer is B-CLL and the TCRβV molecule comprises:

[0261] (i) TCRβ V6 subfamily comprising, optionally TCRβ V6-4*01, TCRβ V6-4*02, TCRβ V6-9*01, TCRβ V6-8*01, TCRβ V6-5*01, TCRβ V6-6*02, TCRβ V6-6*01, TCRβ V6-2*01, TCRβ V6-3*01 or TCRβ V6-1*01;

[0262] (ii) TCRβ V5 subfamily comprising TCRβ V5-6*01, TCRβ V5-4*01, or TCRβ V5-8*01; (iii) TCRβ V3 subfamily comprising TCRβ V3-1*01;

[0263] (iv) TCRβ V2 subfamily comprising TCRβ V2*01; or

[0264] (v) TCRβ V19 subfamily comprising TCRβ V19*01, or TCRβ V19*02.

[0265] In some embodiments, the cancer is melanoma and the TCRβV molecule comprises the TCRβ V6 subfamily comprising, optionally TCRβ V6-4*01, TCRβ V6-4*02, TCRβ V6-9*01, TCRβ V6-8*01, TCRβ V6-5*01, TCRβ V6-6*02, TCRβ V6-6*01, TCRβ V6-2*01, TCRβ V6-3*01 or TCRβ V6-1*01.

[0266] In some embodiments, the cancer is DLBCL and the TCRβV molecule comprises:

[0267] (i) TCRβ V13 subfamily comprising TCRβ V13*01;

[0268] (ii) TCRβ V3 subfamily comprising TCRβ V3-1*01; or

[0269] (iii) TCRβ V23 subfamily.

[0270] In some embodiments, the cancer is CRC and the TCRβV molecule comprises:

[0271] (i) TCRβ V19 subfamily comprising TCRβ V19*01, or TCRβ V19*02

[0272] (ii) TCRβ V12 subfamily comprising TCRβ V12-4*01, TCRβ V12-3*01, or TCRβ V12-5*01 (iii) TCRβ V16 subfamily comprising TCRβ V16*01; or

[0273] (iv) TCRβ V21 subfamily.

[0274] In some embodiments, the tumor comprises an antigen, optionally a tumor antigen, optionally a tumor associated antigen or a neoantigen; and/or the one or more TCRβV subfamilies recognize, optionally bind to, the tumor antigen.

[0275] In some embodiments, the sample comprises a blood sample, optionally a peripheral blood sample, a biopsy, optionally a tumor biopsy, or a bone marrow sample.

[0276] In some embodiments, the sample comprises a biological sample comprising immune cells, optionally TCRBV expressing cells, optionally TCRBV+ cells, T cells, or NK cells.

[0277] In some embodiments, the T cells comprise a CD4 T cell, a CD8 T cell, optionally an effector T cell or a memory T cell, optionally a memory effector T cell, optionally TEM cell, optionally TEMRA cell, or a tumor infiltrating lymphocyte (TIL).

[0278] In some embodiments, the method results in an expansion, optionally in vivo or ex vivo expansion, of at least 1.1-1000 fold, optionally 1.1-10, 10-100, 100-200, 200-300, 300-400, 400-500, 500-600, 600-700, 700-800, 800-900, or 900-1000 fold expansion of an immune effector cell population comprising a TCRVB expressing immune effector cell, optionally T cell.

[0279] In some embodiments, the population of cells is expanded in an appropriate media, optionally media described herein, that includes one or more cytokines, optionally IL-2, IL-7, IL-15, or a combination thereof.

[0280] In some embodiments, the population of cells is expanded for a period of at least about 4 hours, 6 hours, 10 hours, 12 hours, 15 hours, 18 hours, 20 hours, or 22 hours, or for at least 1, 2, 3, 4, 5, 6, 7, 8, 9, 10, 11, 12, 13, 14, 15, 1, 6 17, 18, 19, 20 or 21 days, or for at least about 1 week, 2 weeks, 3 weeks, 4 weeks, 5 weeks, 6 weeks, 7 weeks or 8 weeks.

[0281] In some embodiments, expansion of the population of immune cells, is compared to expansion of a similar population of cells with an antibody that binds to: a CD3 molecule, optionally CD3 epsilon (CD3e) molecule; or a TCR alpha (TCRα) molecule.

[0282] In some embodiments, expansion of the population of immune cells, is compared to expansion of a similar population of cells not contacted with the anti-TCRβV antibody molecule.

[0283] In some embodiments, expansion of the population of T cells having a memory-like phenotype, optionally memory effector T cells, optionally TEM cells, optionally TEMRA cells, is compared to expansion of a similar population of cells with an antibody that binds to: a CD3 molecule, optionally CD3 epsilon (CD3e) molecule; or a TCR alpha (TCRα) molecule.

[0284] In some embodiments, the population of expanded T cells having a memory-like phenotype, optionally effector memory cells, comprises cells which:

[0285] (i) have a detectable level of CD45RA, optionally express or re-express CD45RA;

[0286] (ii) have low or no expression of CCR7; and/or

[0287] (iii) have a detectable level of CD95, optionally express CD95, optionally a population of CD45RA+, CCR7−, CD95+ T cells, optionally wherein the T cells comprise CD3+, CD4+ or CD8+ T cells.

[0288] In some embodiments, the method results in expansion of, optionally selective or preferential expansion of, T cells expressing a T cell receptor (TCR) comprising a TCR alpha and/or TCR beta molecule, optionally TCR alpha-beta T cells (αβ T cells).

[0289] In some embodiments, the method results in expansion of αβT cells over expansion of T cells expressing a TCR comprising a TCR gamma and/or TCR delta molecule, optionally TCR gamma-delta T cells (γδ T cells).

[0290] In some embodiments, the anti-TCRβV antibody molecule comprises an antigen binding domain comprising a light chain variable region (VL) comprising one, two or all of a LC CDR1, a LC CDR2 and a LC CDR3 of a VL disclosed in Tables 1, 2, 10, 11, 12 or 13, optionally SEQ ID NO: 1314, SEQ ID NO: 2, SEQ ID NO: 10, SEQ ID NO: 11, SEQ ID NO: 16, SEQ ID NO: 26, SEQ ID NO: 27, SEQ ID NO: 28, SEQ ID NO: 29 or SEQ ID NO:30

[0291] In some embodiments, the anti-TCRβV antibody molecule comprises an antigen binding domain comprising a heavy chain variable region (VH) comprising one, two or all of a HC CDR1, a HC CDR2 and a HC CDR3 of a VH disclosed in Tables 1, 2, 10, 11, 12 or 13, optionally SEQ ID NO: 1312, SEQ ID NO:1, SEQ ID NO: 9, SEQ ID NO: 15, SEQ ID NO: 23, SEQ ID NO: 24 or SEQ ID NO: 25.

[0292] In some embodiments, the anti-TCRβV antibody molecule comprises an antigen binding domain comprising:

[0293] (i) a VL comprising: a LC CDR1 amino acid sequence of SEQ ID NO: 20 or an amino acid sequence with not more than 1, 2, 3 or 4 modifications, optionally substitutions, additions or deletions thereof, a LC CDR2 amino acid sequence of SEQ ID NO:21 or an amino acid sequence with not more than 1, 2, 3 or 4 modifications, optionally substitutions, additions or deletions thereof, and/or a LC CDR3 amino acid sequence of SEQ ID NO:22 or an amino acid sequence with not more than 1, 2, 3 or 4 modifications, optionally substitutions, additions or deletions thereof; and/or

[0294] (ii) a VH comprising: a HC CDR1 amino acid sequence of SEQ ID NO: 17 or an amino acid sequence with not more than 1, 2, 3 or 4 modifications, optionally substitutions, additions or deletions thereof, a HC CDR2 amino acid sequence of SEQ ID NO:18 or an amino acid sequence with not more than 1, 2, 3 or 4 modifications, optionally substitutions, additions or deletions thereof, and/or a HC CDR3 amino acid sequence of SEQ ID NO:19 or an amino acid sequence with not more than 1, 2, 3 or 4 modifications, optionally substitutions, additions or deletions thereof.

[0295] In some embodiments, the anti-TCRβV antibody molecule comprises an antigen binding domain comprising:

[0296] a variable heavy chain (VH) of SEQ ID NO: 23, SEQ ID NO: 24 or SEQ ID NO: 25, or a sequence having at least about 85%, 90%, 95%, or 99% sequence identity thereto; and/or a variable light chain (VL) of SEQ ID NO: 26, SEQ ID NO: 27, SEQ ID NO: 28, SEQ ID NO: 29 or SEQ ID NO:30, or a sequence having at least about 85%, 90%, 95%, or 99% sequence identity thereto.

[0297] In some embodiments, the anti-TCRβV antibody molecule comprises an antigen binding domain comprising

[0298] (i) a VL comprising: a LC CDR1 amino acid sequence of SEQ ID NO: 6 or an amino acid sequence with not more than 1, 2, 3 or 4 modifications, optionally substitutions, additions or deletions thereof, a LC CDR2 amino acid sequence of SEQ ID NO:7 or an amino acid sequence with not more than 1, 2, 3 or 4 modifications, optionally substitutions, additions or deletions thereof, and/or a LC CDR3 amino acid sequence of SEQ ID NO: 8 or an amino acid sequence with not more than 1, 2, 3 or 4 modifications, optionally substitutions, additions or deletions thereof; and/or

[0299] (ii) a VH comprising: a HC CDR1 amino acid sequence of SEQ ID NO: 3 or an amino acid sequence with not more than 1, 2, 3 or 4 modifications, optionally substitutions, additions or deletions thereof, a HC CDR2 amino acid sequence of SEQ ID NO:4 or an amino acid sequence with not more than 1, 2, 3 or 4 modifications, optionally substitutions, additions or deletions thereof, and/or a HC CDR3 amino acid sequence of SEQ ID NO:5 or an amino acid sequence with not more than 1, 2, 3 or 4 modifications, optionally substitutions, additions or deletions thereof.

[0300] In some embodiments, the anti-TCRβV antibody molecule comprises an antigen binding domain comprising:

[0301] a variable heavy chain (VH) of SEQ ID NO: 1 or SEQ ID NO: 9 or SEQ ID NO: 1312, or a sequence having at least about 85%, 90%, 95%, or 99% sequence identity thereto; and/or a variable light chain (VL) of SEQ ID NO: 2, SEQ ID NO: 10 or SEQ ID NO:11 or SEQ ID NO: 1314, or a sequence having at least about 85%, 90%, 95%, or 99% sequence identity thereto.

[0302] In some embodiments, the anti-TCRβV antibody molecule comprises a light chain comprising a framework region, optionally framework region 1 (FR1), comprising one, two or all, optionally three, of:

[0303] (i) an Aspartic Acid at position 1, optionally a substitution at position 1 according to Kabat numbering, optionally a Alanine to Aspartic Acid substitution; or

[0304] (ii) an Asparagine at position 2, optionally a substitution at position 2 according to Kabat numbering, optionally a Isoleucine to Asparagine, a Serine to Asparagine, or a Tyrosine to Asparagine substitution; or

[0305] (iii) a Leucine at position 4, optionally a substitution at position 4 according to Kabat numbering, optionally a Methionine to Leucine substitution, wherein the substitution is relative to a human germline light chain framework region sequence.

[0306] In some embodiments, the anti-TCRβV antibody molecule comprises a light chain comprising a framework region, optionally framework region 3 (FR3), comprising one, two or all, optionally three, of:

[0307] (i) a Glycine at position 66, optionally a substitution at position 66 according to Kabat numbering, optionally a Lysine to Glycine, or a Serine to Glycine substitution; or

[0308] (ii) an Asparagine at position 69, optionally a substitution at position 69 according to Kabat numbering, optionally a Threonine to Asparagine substitution; or

[0309] (iii) a Tyrosine at position 71, optionally a substitution at position 71 according to Kabat numbering, optionally a Phenylalanine to Tyrosine, or Alanine to Tyrosine substitution, wherein the substitution is relative to a human germline light chain framework region sequence.

[0310] In some embodiments, binding of the anti-TCRβV antibody molecule to the TCRβV region results in a cytokine profile that differs from a cytokine profile of a T cell engager that binds to a receptor or molecule other than a TCRβV region (“a non-TCRβV-binding T cell engager”).

[0311] In some embodiments, the non-TCRβV-binding T cell engager comprises an antibody that binds to a CD3 molecule, optionally CD3 epsilon (CD3e) molecule; or a TCR alpha (TCRα) molecule.

[0312] In some embodiments, the cytokine profile of the first moiety comprises, one, two, three, four, five, six, seven, or all of the following:

[0313] (i) increased level, optionally expression level, and/or activity of IL-2;

[0314] (ii) reduced level, optionally expression level, and/or activity of IL-1β;

[0315] (iii) reduced level, optionally expression level, and/or activity of IL-6;

[0316] (iv) reduced level, optionally expression level, and/or activity of TNFα;

[0317] (v) reduced level, optionally expression level, and/or activity of IL-10;

[0318] (vi) a delay, optionally at least 1, 2, 3, 4, 5, 6, 7, 8, 9, 10 or more hours delay, in increased level, optionally expression level, and/or activity of IL-2;

[0319] (vii) a delay, optionally at least 1, 2, 3, 4, 5, 6, 7, 8, 9, 10 hours delay, in increased level, optionally expression level, and/or activity of IFNg; or

[0320] (viii) increased level, optionally expression level, and/or activity of IL-15, optionally wherein (i)-(vii) are relative to the cytokine profile of the non-TCRβV-binding T cell engager.

[0321] In some embodiments, binding of the anti-TCRβV antibody molecule to the TCRβV region results in reduced cytokine storm, optionally reduced cytokine release syndrome (CRS), as measured by an assay of Example 3, optionally relative to the cytokine storm induced by the non-TCRβV-binding T cell engager.

[0322] In some embodiments, binding of the anti-TCRβV antibody molecule to the TCRβV region results in one, two, three or all of:

[0323] (ix) reduced T cell proliferation kinetics;

[0324] (x) cell killing, optionally target cell killing, optionally cancer cell killing, optionally as measured by an assay of Example 4;

[0325] (xi) increased Natural Killer (NK) cell proliferation, optionally expansion; or

[0326] (xii) expansion, optionally at least about 1.1-10 fold expansion, optionally at least about 1.1, 1.2, 1.3, 1.4, 1.5, 2, 3, 4, 5, 6, 7, 8, 9, or 10 fold expansion, of a population of T cells having a memory-like phenotype,

[0327] optionally relative to the non-TCRβV-binding T cell engager.

[0328] In some embodiments, the anti-TCRβV antibody molecule binds to an outward facing region, optionally epitope, on a TCRβV protein, optionally as depicted by the circled area in FIG. 24A.

[0329] In some embodiments, the outward facing region on the TCRβV protein comprises a structurally conserved region of TCRβV, optionally a region of TCRβV having a similar structure across one or more TCRβV subfamilies.

[0330] In some embodiments, the method further comprises administering, optionally sequentially, simultaneously or concurrently, a second agent, optionally therapeutic agent, optionally as described herein.

[0331] In some embodiments, the second agent, optionally therapeutic agent, comprises a chemotherapeutic agent, a biologic agent, hormonal therapy, radiation, or surgery.

[0332] In some embodiments, the disease is a cancer, optionally a solid tumor or a hematological cancer, or a metastatic lesion.

[0333] In some embodiments, the cancer antigen is BCMA or FcRH5.

### BRIEF DESCRIPTION OF THE DRAWINGS

[0334] The patent or application file contains at least one drawing executed in color. Copies of this patent or patent application publication with color drawing(s) will be provided by the Office upon request and payment of the necessary fee.

[0335] FIGS. 1A-1B shows the alignment of the Antibody A source mouse VH and VL framework 1, CDR 1, framework 2, CDR 2, framework 3, CDR3, and framework 4 regions with their respective humanized sequences. Kabat CDRs are shown in bold, Chothia CDRs are shown in italics, and combined CDRs are shown in boxes. The framework positions that were back mutated are double underlined. FIG. 1A shows VH sequences for murine Antibody A (SEQ ID NO: 1) and humanized Antibody A-H (SEQ ID NO: 9). FIG. 1B shows VL sequences for murine Antibody A (SEQ ID NO: 2) and humanized Antibody A-H (SEQ ID NO: 10 and SEQ ID NO: 11).

[0336] FIGS. 2A-2B shows the alignment of the Antibody B source mouse VH and VL framework 1, CDR 1, framework 2, CDR 2, framework 3, CDR3, and framework 4 regions with their respective humanized sequences. Kabat CDRs are shown in bold, Chothia CDRs are shown in italics, and combined CDRs are shown in boxes. The framework positions that were back mutated are double underlined. FIG. 2A shows the VH sequence for murine Antibody B (SEQ ID NO: 15) and humanized VH sequences B-H.1A to B-H.1C (SEQ ID NOs: 23-25). FIG. 2B shows the VL sequence for murine Antibody B (SEQ ID NO: 16) and humanized VL sequences B-H.1D to B-H.1H (SEQ ID NOs: 26-30).

[0337] FIG. 3 depicts the phylogenetic tree of TCRBV gene family and subfamilies with corresponding antibodies mapped. Subfamily identities are as follows: Subfamily A: TCRβ V6; Subfamily B: TCRβ V10; Subfamily C: TCRβ V12; Subfamily D: TCRβ V5; Subfamily E: TCRβ V7; Subfamily F: TCRβ V11; Subfamily G: TCRβ V14; Subfamily H: TCRβ V16; Subfamily I:TCRβ V18; Subfamily J:TCRβ V9; Subfamily K: TCRβ V13; Subfamily L: TCRβ V4; Subfamily M:TCRβ V3; Subfamily N:TCRβ V2; Subfamily O:TCRβ V15; Subfamily P: TCRβ V30; Subfamily Q: TCRβ V19; Subfamily R:TCRβ V27; Subfamily S:TCRβ V28; Subfamily T: TCRβ V24; Subfamily U: TCRβ V20; Subfamily V: TCRβ V25; and Subfamily W:TCRβ V29 subfamily. Subfamily members are described in detail herein in the Section titled “TCR beta V (TCRβV)”.

[0338] FIGS. 4A-4C show human CD3+ T cells activated by anti-TCR V1313.1 antibody (A-H.1) for 6-days. Human CD3+ T cells were isolated using magnetic-bead separation (negative selection) and activated with immobilized (plate-coated) anti-TCR Vβ13.1 (A-H.1) or anti-CD3E (OKT3) antibodies at 100 nM for 6 days. FIG. 4A shows two scatter plots (left: activated with OKT3; and right: activated with A-H.1) of expanded T cells assessed for TCR Vβ13.1 surface expression using anti-TCR Vβ13.1 (A-H.1) followed by a secondary fluorochrome—conjugated antibody for flow cytometry analysis. FIG. 4B shows percentage (%) of TCR Vβ13.1 positive T cells activated by anti-TCR Vβ13.1 (A-H.1) or anti-CD3e (OKT3) plotted against total T cells (CD3+). FIG. 4C shows relative cell count acquired by counting the number of events in each T cell subset gate (CD3 or TCR V1313.1) for 20 seconds at a constant rate of 60 μl/min. Data shown as mean value from 3 donors.

[0339] FIGS. 5A-5B show cytolytic activity of human CD3+ T cells activated by anti-TCR V1313.1 antibody (A-H.1) against transformed cell line RPMI 8226. FIG. 5A depicts target cell lysis of human CD3+ T cells activated with A-H.1 or OKT3. Human CD3+ T cells were isolated using magnetic-bead separation (negative selection) and activated with immobilized (plate-coated) A-H.1 or OKT3 at the indicated concentrations for 4 days prior to co-culture with RPMI 8226 cells at a (E:T) ratio of 5:1 for 2 days. Samples were next analyzed for cell lysis of RPMI 8226 cells by FACS staining for CFSE/CD138-labeled, and membrane-impermeable DNA dyes (DRAQ7) using flow cytometry analysis. FIG. 5B shows target cell lysis of human CD3+ T cells activated with A-H.1 or OKT3 incubated with RPMI-8226 at a (E:T) ratio of 5:1 for 6 days followed by cell lysis analysis of RPMI 8226 cells as described above. Percentage (%) target cell lysis was determined by normalizing to basal target cell lysis (i.e. without antibody treatment) using the following formula, [(x−basal)/(100%−basal), where x is cell lysis of sample]. Data shown is a representative of n=1 donor.

[0340] FIGS. 6A-6B show IFNg production by human PBMCs activated with the indicated antibodies. Human PBMCs were isolated from whole blood from the indicated number of donors, followed by solid-phase (plate-coated) stimulation with the indicated antibodies at 100 Nm. Supernatant was collected on Days 1, 2, 3, 5, or 6. FIG. 6A is a graph comparing the production of IFNg in human PBMCs activated with the antibodies indicated activated with anti-TCR Vβ13.1 antibodies (A-H.1 or A-H.2) or anti-CD3e antibodies (OKT3 or SP34-2) on Day 1, 2, 3, 5, or 6 post-activation. FIG. 6B shows IFNg production in human PBMCs activated with the antibodies indicated activated with the indicated anti-TCR Vβ13.1 antibodies or anti-CD3e antibody (OKT3) on Day 1, 2, 3, 5, or 6 post-activation.

[0341] FIGS. 7A-7B show IL-2 production by human PBMCs activated with the indicated antibodies. A similar experimental setup as described for FIGS. 6A-6B was used.

[0342] FIGS. 8A-8B show IL-6 production by human PBMCs activated with the indicated antibodies. A similar experimental setup as described for FIGS. 6A-6B was used.

[0343] FIGS. 9A-9B show TNF-alpha production by human PBMCs activated with the indicated antibodies. A similar experimental setup as described for FIGS. 6A-6B was used.

[0344] FIGS. 10A-10B show IL-1beta production by human PBMCs activated with the indicated antibodies. A similar experimental setup as described for FIGS. 6A-6B was used.

[0345] FIGS. 11A-11B are graphs showing delayed kinetics of IFNg secretion in human PMBCs activated by anti-TCR Vβ13.1 antibody A-H.1 when compared to PBMCs activated by anti-CD3e antibody OKT3. FIG. 11A shows IFNg secretion data from 4 donors. FIG. 11B shows IFNg secretion data from 4 additional donors. Data shown is representative of n=8 donors.

[0346] FIG. 12 depicts increased CD8+ TSCM and Temra T cell subsets in human PBMCs activated by anti-TCR Vβ13.1 antibodies (A-H.1 or A-H.2) compared to PBMCs activated by anti-CD3e antibodies (OKT3 or SP34-2).

[0347] FIGS. 13A-13F show characterization of an anti-TCRVb antibody. FIG. 13A is a graph depicting proliferation of T cells activated with anti-CD3 (OKT3) antibody or anti-TCRVb antibody. FIG. 13B shows selective expansion of CD45RA+ effector memory CD8+ and CD4+ T cells (TEMRA) cells with anti-TCRVb antibodies. Tn=naïve T cell; Tscm=stem cell memory T cell; Tcm=central memory T cell; Tem=effector memory T cell; Temra=effector memory CD45RA+ T cell. FIG. 13C is a graph showing IFN-g secretion by PBMCs stimulated with an anti-TCRVb antibody, or anti-CD3 antibodies. FIG. 13D shows target cell lysis by T cells stimulated with an anti-TCRVb antibody, or anti-CD3 antibodies. Cells were stimulated for 4 days followed by 2 days incubation with multiple myeloma target cells for assessment of cell killing. FIG. 13E is a graph showing perforin secretion by T cells stimulated with an anti-TCRVb antibody, or an anti-CD3 antibody. Perforin was analyzed by FACS staining in TCRVB-positive and TCRVB-negative T cells in PBMCs after 5 days of stimulation with 100 ng/ml plate-bound antibody. FIG. 13F is a graph showing Granzyme B by T cells stimulated with an anti-TCRVb antibody, or an anti-CD3 antibody. Granzyme B was analyzed by FACS staining in TCRVB-positive and TCRVB-negative T cells in PBMCs after 5 days of stimulation with 100 ng/ml plate-bound antibody.

[0348] FIGS. 14A-14B show production of IL-2 and IL-15 and expansion of human NK cells by stimulation of PBMCs with anti-TCRVb antibody for 6 days at a dose of 100 nM. FIG. 14A shows secretion of IL-2 or IL-15 in T cells stimulated with an anti-TCRVb antibody, or anti-CD3 antibodies. FIG. 14B depicts flow cytometry dot plots showing NKp46 staining vs CD56 antibody staining in cells stimulated with an anti-TCRVb antibody or an anti-CD3 antibody or a control sample.

[0349] FIGS. 15A-15C show secretion of cytokines in PBMCs stimulated with an anti-TCRVb antibody, or anti-CD3 antibodies. FIG. 15A, IL-6; FIG. 15B, IL-10; FIG. 15C, TNFα

[0350] FIGS. 16A-16B show killing of MM cells by dual targeting BCMA-TCRvb antibody molecules. FIG. 16A shows in vitro killing by one of the following dual-targeting antibody molecules: BCMA-TCRVb (Molecule I), BCMA-CD3, or Control-TCRVb; or an isotype control.

[0351] FIG. 16B shows in vivo killing of MM cells by a dual-targeting BCM-TCRVb antibody (Molecule I).

[0352] FIG. 17 shows lysis of MM target cells with a dual targeting antibody (Molecule E) which recognized FcRH5 on one arm and TCRVb on the other arm.

[0353] FIGS. 18A-18B demonstrate cytokine production from human PBMCs activated by anti-TCR Vβ8a antibodies (B-H.1) when compared to those activated by anti-CD3ϵ antibodies (OKT3 or SP34-2). FIG. 18A shows that human PBMCs activated by anti-TCR Vβ8a antibodies (B-H.1) produce similar or reduced levels of IFNγ. FIG. 18B shows human PBMCs activated by anti-TCR Vβ8a antibodies (B-H.1) produce higher levels of IL-2 when compared to those activated by anti-CDR antibodies (OKT3 or SP34-2). Data shown is representative of n=6 donors.

[0354] FIGS. 19A-19C demonstrate cytokine production from human PBMCs activated by anti-TCR Vβ8a antibodies (B-H.1). Human PBMCs activated by anti-TCR Vβ8a antibodies (B-H.1) do not significantly produce IL-6 (FIG. 19A), IL 1b (FIG. 19B), and less TNFα (FIG. 19C), when compared to PBMCs activated by anti-CD3Σ antibodies (OKT3 or SP34-2). Data shown is representative of n=6 donors.

[0355] FIGS. 20A-20E demonstrate cytokine production from human PBMCs activated by anti-TCRβV Antibody D antibody compared to control anti-CD3e antibody (OKT3). FIG. 20A shows that human PBMCs activated by anti-TCRβV Antibody D antibody produce similar or reduced levels of IFNγ. FIG. 20B shows human PBMCs activated by anti-TCRβV Antibody D antibody produce higher levels of IL-2 when compared to those activated by anti-CD3Σ antibodies (OKT3). Human PBMCs activated by anti-TCRβV Antibody D antibody do not significantly produce IL-1beta (FIG. 20C), IL-6, (FIG. 20D), or TNFalpha (FIG. 20E). Data shown is representative of n=4 donors.

[0356] FIGS. 21A-21B demonstrate cytokine production from human PBMCs activated by anti-TCR Vβ5 antibody (Antibody E). FIG. 21A shows that human PBMCs activated by anti-TCR Vβ5 antibody produce similar or reduced levels of IFNγ compared to PBMCS activated by anti-CD3Σ antibodies (OKT3 or SP34-2). FIG. 21B shows human PBMCs activated by the anti-TCR Vβ5 1 antibody produce higher levels of IL-2 when compared to those activated by anti-CD3Σ antibodies (OKT3 or SP34-2). Data shown is representative of n=4 donors.

[0357] FIGS. 22A-22D demonstrate cytokine production from human PBMCs activated by an anti-TCR Vβ5 antibody (Antibody E). Human PBMCs activated by anti-TCR Vβ5 antibody do not significantly produce IL-1beta (FIG. 22A), IL-6, (FIG. 22B), TNFalpha (FIG. 22C), or IL-10 (FIG. 22D) as compared to PBMCs activated by anti-CD3Σ antibodies (OKT3 or SP34-2). Data shown is representative of n=4 donors.

[0358] FIGS. 23A-23F demonstrate cytokine production from human PBMCs activated by a dual targeting (bispecific molecule) comprising an anti-TCRβV binding moiety and a BCMA binding moiety. FIG. 23A shows that human PBMCs activated by the bispecific molecule produce similar or reduced levels of IFNγ as PBMCS activated by anti-CD3Σ antibodies (OKT3). FIG. 23B shows human PBMCs activated by the bispecific molecule produce higher levels of IL-2 when compared to PBMCs activated by anti-CD3Σ antibodies (OKT3). Human PBMCs activated by the bispecific molecule do not significantly produce IL-1beta (FIG. 23C), IL-6, (FIG. 23D), TNFalpha (FIG. 23E), or IL-10 (FIG. 23F). Data shown is representative of n=3 donors.

[0359] FIGS. 24A-24B show the structure and sequence of eight TCRβV proteins from seven different subfamilies: TCRβV6 subfamily (TCRβV6-5 and TCRβV6-4 are shown), TCRβV28 subfamily, TCRβV19 subfamily, TCRβV9 subfamily, TCRβV5 subfamily, TCRβV20 subfamily and TCRβV12 subfamily. FIG. 24A shows the structural alignment of the different TCRβV proteins. The circled area represents the outward facing region comprising the proposed binding site for the anti-TCRβV antibodies disclosed herein. FIG. 24B shows the amino acid sequence alignment of the proteins shown in FIG. 24A (SEQ ID NOS: 3449-3456, respectively, in order of appearance). The various TCRβV proteins (from 7 different TCRβV subfamilies) have diverse sequences but share a conserved (similar) structure and function.

[0360] FIGS. 25A-25J show cytokine or chemokine secretion of PBMCs activated with anti-TCRVb antibodies (A-H.1, B-H.1), a bispecific molecule comprising an anti-TCRVb antibody (Molecule H), control isotype (122) or anti-CD3e antibody (OKT3). Data shown is representative of n=2 donors and representative of 2 independent experiments. FIG. 25A, IFNγ; FIG. 25B, IL-2; FIG. 25C, IL-1β; FIG. 25D, IL-6; FIG. 25E, IL-10; FIG. 25F, IL-4; FIG. 25G, TNFα; FIG. 2511, IL-12p70; FIG. 251, IL-13; FIG. 25J, IL-8.

[0361] FIGS. 26A-26H show cytokine or chemokine secretion of PBMCs activated with anti-TCRVb antibodies (A-H.1, B-H.1), a bispecific molecule comprising an anti-TCRVb antibody (Molecule H), control isotype (122) or anti-CD3e antibody (OKT3). Data shown is representative of n=2 donors and representative of 2 independent experiments. FIG. 26A, Eotaxin; FIG. 26B, Eotaxin-3; FIG. 26C, IL-8 (HA); FIG. 26D, IP-10; FIG. 26E, MCP-1; FIG. 26F, MCP-4; FIG. 26G, MDC; FIG. 2611, MIP-1a.

[0362] FIGS. 27A-27L show cytokine or chemokine secretion of PBMCs activated with anti-TCRVb antibodies (A-H.1, B-H.1), a bispecific molecule comprising an anti-TCRVb antibody (Molecule H), control isotype (122) or anti-CD3e antibody (OKT3). Data shown is representative of n=2 donors and representative of 2 independent experiments. FIG. 27A, MIP-1B; FIG. 27B, TARC; FIG. 27C, GM-CSF; FIG. 27D, IL-12-23p40; FIG. 27E, IL-15; FIG. 27F, IL-16; FIG. 27G, IL-17a; FIG. 2711, IL-1a; FIG. 271, IL-5; FIG. 27J, IL-7; FIG. 27K, TNF-β; FIG. 27L, VEGF.

[0363] FIG. 28 is a graph depicting mean tumor volume in NOD/SCID/IL-2Rγnull (NSG) mice engrafted with Raji-luc cells at days 10 to 28. The Star denotes PBMC implantation. Open triangles denote antibody treatment with the indicated antibodies.

[0364] FIGS. 29A-29B depicting Mean tumor burden (Total Flux) in NOD/SCID/IL-2Rγnull (NSG) mice engrafted with cancer cells and treated with the indicated antibody. NSG mice were implanted with PBMCs on Day 1 followed by injection with cancer cells on Day 7 (Raji-luc in FIG. 29A; K562-Luc control in FIG. 29B). Antibody treatment with the indicated antibodies began on Day 16. FIG. 29A shows mean tumor burden at days 16 to 37 in NOD/SCID/IL-2Rγnull (NSG) mice engrafted with Raji-luc cells. FIG. 29B shows mean tumor burden (Total Flux) at days 16 to 30 in animals engrafted with K562-luc cells.

[0365] FIG. 30 is a graph depicting Mean tumor burden (Total Flux) mean tumor volume in NOD/SCID/IL-2Rγnull (NSG) mice engrafted with RPMI-8226 cells. The RPMI-8226 cells were engrafted on Day 1. On Day 11, PBMCs were implanted into the mice and antibody treatment began on Day 17.

[0366] FIGS. 31A-31B are graphs showing % target cell lysis at different antibody concentrations. FIG. 31A shows data generated using anti-TCR Vβ13.1/anti-CD19 (Molecule F), anti-CD3/anti-CD19, and anti-TCR V1313.1 (A-H.1). FIG. 31B shows data generated using anti-TCR V1313.1/anti-BCMA (Molecule G), anti-CD3/anti-BCMA, and anti-TCR V1313.1 (A-H.1).

[0367] FIGS. 32A-32F are graphs showing cytokine secretion stimulated by anti-TCR Vβ/anti-BCMA (Molecule H) or anti-CD3 (OKT3) at Days 1, 2, 3, and 5. Cytokines examined include: IFNγ (FIG. 32A), IL-2 (FIG. 32B), IL-10 (FIG. 32C), IL-6 (FIG. 32D), IL-10 (FIG. 32E), and TNFα (FIG. 32F).

[0368] FIGS. 33A-33F are graphs showing cytokine secretion stimulated by anti-TRBC1 (Antibody F) or anti-CD3 (OKT3) at Days 2 and 5. Cytokines examined include: IFNγ (FIG. 33A), IL-2 (FIG. 33B), IL-10 (FIG. 33C), IL-6 (FIG. 33D), IL-10 (FIG. 33E), and TNFα (FIG. 33F).

[0369] FIG. 34 is a FACS plot showing the expansion of TCRvb 6-5+ T cells over 8 days using anti-TCRvb 6-5 v1.

[0370] FIG. 35 is a bar graph showing the expansion of TCRvb 6-5+CD4+ T cells and TCRvb 6-5+CD8+ T cells over 8 days using the anti-CD3c antibody OKT3 (100 nM).

[0371] FIG. 36 is a bar graph showing the expansion of TCRvb 6-5+CD4+ T cells and TCRvb 6-5+CD8+ T cells over 8 days using the anti-TCRvb 6-5 v1 antibody (100 nM).

[0372] FIG. 37 is a FACS plot showing the showing the expansion of TCRvb 6-5+ T cells over 8 days using anti-TCRvb 6-5 v1 or the anti-CD3ε antibody OKT3.

[0373] FIG. 38A is a bar graph showing the percentage of TCRβV 6-5+ T cells in PBMC cultures after 8 days of culture with the indicated antibody. Data for 5 replicates are shown. FIG. 38B is a bar graph showing the percentage of TCRβV 6-5+ T cells in purified T cell cultures after 8 days of culture with the indicated antibody. Data for 5 replicates are shown.

[0374] FIG. 39A is a bar graph showing the relative count of TCRβV 6-5+ T cells in PBMC culture after 8 days of culture with the indicated antibody. FIG. 39B is a bar graph showing the relative count of TCRβV 6-5+ T cells in PBMC culture after 8 days of culture with the indicated antibody.

[0375] FIG. 40A is a bar graph showing the relative count of TCRβV 6-5+ T cells in a purified T cell culture after 8 days of culture with the indicated antibody. FIG. 40B is a bar graph showing the relative count of TCRβV 6-5+ T cells in a purified T cell culture after 8 days of culture with the indicated antibody.

[0376] FIG. 41 is a line graph showing the total CD3+ T cell count (fold increase) after 8 days of T cell culture with either the anti-CD3ε antibody OKT3 or the anti-TCRvb 6-5 v1 antibody.

[0377] FIG. 42 is a series of line graphs showing the kinetics of target cells by TCRβV 6-5 v1 activated T cells or anti-CD3ε (OKT3) activated T cells. T cells from three different donors were utilized (donor 6769, donor 9880, donor 5411).

[0378] FIG. 43A is a scatter plot showing the percent of target cell lysis by T cells by TCRβV 6-5 v1 activated T cells or anti-CD3ε (OKT3) activated T cells without T cell pre activation. The data is presented at day 6 of co-culture between target cells and effector T cells. FIG. 43B is a scatter plot showing the percent of target cell lysis by T cells by TCRβV 6-5 v1 activated T cells or anti-CD3ε (OKT3) activated T cells with 4 days of T cell pre activation. The data is presented at day 2 of co-culture between target cells and effector T cells (after 4 days of T cell pre-activation).

[0379] FIG. 44 is a scatter plot showing the percent of target cell lysis by T cells by TCRβV 6-5 v1 activated T cells or anti-CD3ε (OKT3) activated T cells with 4 days of T cell pre activation. The data is presented at day 2 of co-culture between target cells and effector T cells (after 4 days of T cell pre-activation).

[0380] FIG. 45 is a bar graph showing target cell lysis by T cells by TCRβV 6-5 v1 activated T cells or anti-CD3ε (OKT3) activated T cells (100 nM each antibody). The data includes seven replicates of each experimental condition.

[0381] FIG. 46 is a series of FACS plots that show the cell surface expression of CD3ε on CD4+ TCRβV 6-5⁻ or CD4+ TCRβV 6-5⁺ T cells activated with either SP34-2 (anti-CD3ε antibody) or anti-TCRβV 6-5 v1 (anti-TCRβV 6-5 antibody) at days 0, 1, 2, 4, 6, or 8 post antibody activation.

[0382] FIG. 47 is a series of FACS plots that show the cell surface expression of CD3ε on CD8+ TCRβV 6-5⁻ or CD8+ TCRβV 6-5⁺ T cells activated with either SP34-2 (anti-CD3ε antibody) or anti-TCRβV 6-5 v1 (anti-TCRβV 6-5 antibody) at days 0, 1, 2, 4, 6, or 8 post antibody activation.

[0383] FIG. 48 is a series of FACS plots that show the cell surface expression of TCRβV on CD4+ TCRβV 6-5⁻ or CD4+ TCRβV 6-5⁺ T cells activated with either SP34-2 (anti-CD3ε antibody) or anti-TCRβV 6-5 v1 (anti-TCRβV 6-5 antibody) at days 0, 1, 2, 4, 6, or 8 post antibody activation.

[0384] FIG. 49 is a series of FACS plots that show the cell surface expression of TCRβV on CD8+ TCRβV 6-5⁻ or CD8+ TCRβV 6-5⁺ T cells activated with either SP34-2 (anti-CD3ε antibody) or anti-TCRβV 6-5 v1 (anti-TCRβV 6-5 antibody) at days 0, 1, 2, 4, 6, or 8 post antibody activation.

[0385] FIG. 50A shows FACS plot of TCRβV 6-5⁺ cynomolgus T cell expansion either unstimulated (left) or stimulated with anti-TCRβV 6-5 v1 (right) 7 days post activation of cynomolgus PBMCs. PBMCs from Donor DW8N (fresh PBMC sample, male, age 8, weight 7.9 kgs) were used. FIG. 50B shows FACS plot of TCRβV 6-5⁺ cynomolgus T cell expansion either unstimulated (left) or stimulated with anti-TCRβV 6-5 v1 (right) 7 days post activation of cynomolgus PBMCs. PBMCs from Donor G709 (cryopreserved sample, male, age 6, weight 4.7 kgs) were used.

[0386] FIG. 51 shows FACS plot and corresponding microscopy images of TCRβV 6-5⁺ cynomolgus T cell expansion either unstimulated (left), stimulated with SP34-2 (anti-CD3ε antibody) (middle); or stimulated with anti-TCRβV 6-5 v1 (right) post activation of cryopreserved donor DW8N cynomolgus PBMCs. The microscopy images show the cell cluster formation (indicated by circles).

[0387] FIG. 52 shows a schematic of FACS plot showing the FACS gating/staining of PBMCs prior γδ T cell purification.

[0388] FIG. 53 shows a schematic of FACS plot showing the FACS gating/staining of purified γδ T cell population.

[0389] FIG. 54 show activation of purified γδ T cell population with anti-CD3ε antibody (SP34-2) (left) or anti-TCRβV antibody (anti-TCRβV 6-5 v1) (right).

[0390] FIG. 55A shows the release of IFNγ from purified γδ T cell populations activated with anti-CD3£ antibody (SP34-2), anti-TCRβV antibody (anti-TCRβV 6-5 v1), or unstimulated. FIG. 55B shows the release of TNFα from purified γδ T cell populations activated with anti-CD3ε antibody (SP34-2), anti-TCRβV antibody (anti-TCRβV 6-5 v1), or unstimulated. FIG. 55C shows the release of IL-2 from purified γδ T cell populations activated with anti-CD3ε antibody (SP34-2), anti-TCRβV antibody (anti-TCRβV 6-5 v1), or unstimulated. FIG. 55D shows the release of IL-17A from purified γδ T cell populations activated with anti-CD3ε antibody (SP34-2), anti-TCRβV antibody (anti-TCRβV 6-5 v1), or unstimulated. FIG. 55E shows the release of IL-1α from purified yS T cell populations activated with anti-CD3ε antibody (SP34-2), anti-TCRβV antibody (anti-TCRβV 6-5 v1), or unstimulated. FIG. 55F shows the release of IL-10 from purified γδ T cell populations activated with anti-CD3ε antibody (SP34-2), anti-TCRβV antibody (anti-TCRβV 6-5 v1), or unstimulated. FIG. 55G shows the release of IL-6 from purified γδ T cell populations activated with anti-CD3ε antibody (SP34-2), anti-TCRβV antibody (anti-TCRβV 6-5 v1), or unstimulated. FIG. 55H shows the release of IL-10 from purified γδ T cell populations activated with anti-CD3£ antibody (SP34-2), anti-TCRβV antibody (anti-TCRβV 6-5 v1), or unstimulated.

[0391] FIG. 56 shows the relative representations of all TCR alpha V segments (TRAV group of genes) and their variants (top), all TCR beta V segment 6-5 variants (TRBV6-5 gene) (bottom left), and all TCR beta V segments and variants excluding 6-5 (bottom right).

[0392] FIG. 57A is a FACS plot showing phenotypic markers of CD4+ T cells expanded with anti-TCRβV antibody (anti-TCRβV 6-5 v1). Defined phenotypes include TEMRA (top left), Naïve/TSCM (top right), TEM (bottom left), and TCM (bottom right). FIG. 57B is a FACS plot showing phenotypic markers of CD4+ T cells expanded with anti-CD3ε antibody (OKT3). Defined phenotypes include TEMRA (top left), Naïve/TSCM (top right), TEM (bottom left), and TCM (bottom right).

[0393] FIG. 58A is a FACS plot showing phenotypic markers of CD8+ T cells expanded with anti-TCRβV antibody (anti-TCRβV 6-5 v1). Defined phenotypes include TEMRA (top left), Naïve/TSCM (top right), TEM (bottom left), and TCM (bottom right). FIG. 58B is a FACS plot showing phenotypic markers of CD8+ T cells expanded with anti-CD3ε antibody (OKT3). Defined phenotypes include TEMRA (top left), Naïve/TSCM (top right), TEM (bottom left), and TCM (bottom right).

[0394] FIG. 59A is a bar graph showing the percentage of PD1 expressing CD4+ T cells from T cell cultures activated with anti-TCRβV antibody (anti-TCRβV 6-5 v1), anti-CD3ε antibody (OKT3), or unstimulated. FIG. 59B is a bar graph showing the percentage of PD1 expressing CD8+ T cells from T cell cultures activated with anti-TCRβV antibody (anti-TCRβV 6-5 v1), anti-CD3ε antibody (OKT3), or unstimulated.

[0395] FIG. 60A is a bar graph showing the expression of Ki-67 by CD4+ T cells from T cell cultures activated with anti-TCRβV antibody (anti-TCRβV 6-5 v1), anti-CD3ε antibody (OKT3), or unstimulated. FIG. 60B is a bar graph showing the expression of Ki-67 by CD8+ T cells from T cell cultures activated with anti-TCRβV antibody (anti-TCRβV 6-5 v1), anti-CD3ε antibody (OKT3), or unstimulated.

[0396] FIG. 61A is a FACS plot showing the percentage of TEMRA-like CD8+ T cells activated using anti-TCRβV antibody (anti-TCRβV 6-5 v1) that express CD57 (18.7%). FIG. 61B is a FACS plot showing the percentage of TEM-like CD8+ T cells activated using anti-CD3ε antibody (OKT3) that express CD57 (46.8%) and the percentage of TCM-like CD8+ T cells activated using anti-CD3ε antibody (OKT3) that express CD57 (18.9%).

[0397] FIG. 62 shows a series of FACS plots showing the expression of expression of CD27 and by CD4+(top) or CD8+(bottom) T cells from T cell cultures activated with anti-TCRβV antibody (anti-TCRβV 6-5 v1), anti-CD3ε antibody (OKT3), or unstimulated.

[0398] FIG. 63 shows a series of FACS plots showing the expression of expression of OX40, 41BB, and ICOS by CD4+(top) or CD8+(bottom) T cells from T cell cultures activated with anti-TCRβV antibody (anti-TCRβV 6-5 v1), anti-CD3ε antibody (OKT3), or unstimulated.

[0399] FIG. 64 shows a series of FACS plots showing the percentage of CD3+(CD4 gated) TCRβV 6-5+ T cells 1, 2, 3, 4, 5, 6, and 8 days port activation with BCMA and the anti-TCR antibody anti-TCR Vβ6-5 v1.

[0400] FIG. 65A shows a series of FACS plots showing the percentage of CD4+ T cells expanded using isotype control (IgG1 N297A), anti-TCRβV (anti-TCR Vβ6-5 v1), or anti-CD3ε (OKT3) antibodies on day 0 post activation. FIG. 65B shows a series of FACS plots showing the percentage of CD4+ T cells expanded using isotype control (IgG1 N297A), anti-TCRβV (anti-TCR Vβ6-5 v1), or anti-CD3ε (OKT3) antibodies on day 1 post activation. FIG. 65C shows a series of FACS plots showing the percentage of CD4+ T cells expanded using isotype control (IgG1 N297A), anti-TCRβV (anti-TCR Vβ6-5 v1), or anti-CD3ε (OKT3) antibodies on day 2 post activation. FIG. 65D shows a series of FACS plots showing the percentage of CD4+ T cells expanded using isotype control (IgG1 N297A), anti-TCRβV (anti-TCR Vβ6-5 v1), or anti-CD3ε (OKT3) antibodies on day 3 post activation. FIG. 65E shows a series of FACS plots showing the percentage of CD4+ T cells expanded using isotype control (IgG1 N297A), anti-TCRβV (anti-TCR Vβ6-5 v1), or anti-CD3ε (OKT3) antibodies on day 4 post activation. FIG. 65F shows a series of FACS plots showing the percentage of CD4+ T cells expanded using isotype control (IgG1 N297A), anti-TCRβV (anti-TCR Vβ6-5 v1), or anti-CD3ε (OKT3) antibodies on day 5 post activation. FIG. 65G shows a series of FACS plots showing the percentage of CD4+ T cells expanded using isotype control (IgG1 N297A), anti-TCRβV (anti-TCR Vβ6-5 v1), or anti-CD3ε (OKT3) antibodies on day 6 post activation. FIG. 65H shows a series of FACS plots showing the percentage of CD4+ T cells expanded using isotype control (IgG1 N297A), anti-TCRβV (anti-TCR Vβ6-5 v1), or anti-CD3ε (OKT3) antibodies on day 8 post activation.

[0401] FIG. 66A is a bar graph showing ATP production from glycolysis of T cell cultures activated with the indicated antibodies. FIG. 66B is a bar graph showing ATP production from oxidative phosphorylation of T cell cultures activated with the indicated antibodies.

[0402] FIG. 67 is a line graph showing the oxygen consumption rate (OCR) of T cells from about 0 to 75 minutes activated with the indicated antibody.

[0403] FIG. 68A shows the oxygen consumption rate (OCR) of T cells activated with the indicated antibody during basal respiration. FIG. 68B shows the oxygen consumption rate (OCR) of T cells activated with the indicated antibody during maximal respiration. FIG. 68C shows the oxygen consumption rate (OCR) of T cells activated with the indicated antibody during spare respiratory capacity. FIG. 68D is a line graph indicates the areas of basal respiration and maximal respiration as shown in FIG. 68A and FIG. 68B, respectively.

[0404] FIG. 69A is a bar graph showing ATP production from glycolysis of T cell cultures activated with anti-TCRβV 6-5 v1 and re-stimulated with the indicated antibody. FIG. 69B is a bar graph showing ATP production from oxidative phosphorylation of T cell cultures activated with anti-TCRβV 6-5 v1 and re-stimulated with the indicated antibody.

[0405] FIGS. 70A-70G are graphs showing expression of IFNg (FIG. 70A), TNFα (FIG. 70E), IL-1a (FIG. 70B), IL-1b (FIG. 70C), IL-6 (FIG. 70D), IL-10 (FIG. 70F), IL-17A (FIG. 70G) (CRS and neurotoxicity associated cytokines) with BHM1710 (anti TCRVB), a reduced affinity anti CD3 antibody (TB) and the SP34 anti CD3e antibody.

[0406] FIG. 71 is a FACS plot showing the percentage of NK cells expanded from T cell cultures activated with the indicated antibody.

[0407] FIG. 72 is a bar graph showing the number of NK cells expanded from T cell cultures activated with the indicated antibody.

[0408] FIG. 73 shows a series of FACS plots showing NK cell proliferation induced by T cell cultures activated with the indicated antibody.

[0409] FIG. 74 is a schematic showing an assay described in Example for determining NK cell mediated lysis of target K562 cells.

[0410] FIG. 75 is a bar graph showing the percent target cell lysis mediated by NK cells activated by PBMCs activated with the indicated antibody.

[0411] FIG. 76 shows a series of FACS plots showing the proliferation of NK cells from PBMC cultures activated/expanded with the indicated antibody (isotype control or OKT3). PBMCs from three donors (D1, D2, and D3) were analyzed.

[0412] FIG. 77 shows a series of FACS plots showing the proliferation of NK cells from PBMC cultures activated/expanded with the indicated antibody (anti-TCRβ12-3/4 v1 or anti-TCRvβ12-3/4 v2). PBMCs from three donors (D1, D2, and D3) were analyzed.

[0413] FIG. 78 shows a series of FACS plots showing the proliferation of NK cells from PBMC cultures activated/expanded with the indicated antibody (anti-TCRβ12-3/4 v3 or SP34-2). PBMCs from three donors (D1, D2, and D3) were analyzed.

[0414] FIG. 79 is a bar graph showing the level of secreted IFNγ by T cells activated/expanded with the indicated antibody (anti-TCRβV 6-5 v1, OKT3, or SP34) and cultured with said antibody for the indicated number of days (1, 3, or 5).

[0415] FIG. 80 is a bar graph showing the level of secreted IL-2 by T cells activated/expanded with the indicated antibody (anti-TCRβV 6-5 v1, OKT3, or SP34) and cultured with said antibody for the indicated number of days (1, 3, or 5).

[0416] FIG. 81 is a bar graph showing the level of secreted IL-15 by T cells activated/expanded with the indicated antibody (anti-TCRβV 6-5 v1, OKT3, or SP34) and cultured with said antibody for the indicated number of days (1, 3, or 5).

[0417] FIG. 82 is a bar graph showing the level of secreted IL-1β by T cells activated/expanded with the indicated antibody (anti-TCRβV 6-5 v1, OKT3, or SP34) and cultured with said antibody for the indicated number of days (1, 3, or 5).

[0418] FIG. 83 is a bar graph showing the level of secreted IL-6 by T cells activated/expanded with the indicated antibody (anti-TCRβV 6-5 v1, OKT3, or SP34) and cultured with said antibody for the indicated number of days (1, 3, or 5).

[0419] FIG. 84 is a bar graph showing the level of secreted IL-10 by T cells activated/expanded with the indicated antibody (anti-TCRβV 6-5 v1, OKT3, or SP34) and cultured with said antibody for the indicated number of days (1, 3, or 5).

[0420] FIG. 85 is a bar graph showing the level of the indicated cytokine secreted by T cells activated/expanded with the indicated antibody (anti-TCRβV 6-5 v1 or SP34). The data includes use of 17 individual PBMC donors.

[0421] FIG. 86A is a bar graph showing the level of secreted IFNγ by T cells activated/expanded with the indicated antibody (anti-TCRβV 6-5 v1 or OKT3) and cultured with said antibody for the indicated number of days (1, 2, 3, 5, or 6). FIG. 86B is a bar graph showing the level of secreted IL-1β by T cells activated/expanded with the indicated antibody (anti-TCRβV 6-5 v1 or OKT3) and cultured with said antibody for the indicated number of days (1, 2, 3, 5, or 6).

[0422] FIG. 86C is a bar graph showing the level of secreted IL-4 by T cells activated/expanded with the indicated antibody (anti-TCRβV 6-5 v1 or OKT3) and cultured with said antibody for the indicated number of days (1, 2, 3, 5, or 6). FIG. 86D is a bar graph showing the level of secreted IL-6 by T cells activated/expanded with the indicated antibody (anti-TCRβV 6-5 v1 or OKT3) and cultured with said antibody for the indicated number of days (1, 2, 3, 5, or 6). FIG. 86E is a bar graph showing the level of secreted IL-10 by T cells activated/expanded with the indicated antibody (anti-TCRβV 6-5 v1 or OKT3) and cultured with said antibody for the indicated number of days (1, 2, 3, 5, or 6). FIG. 86F is a bar graph showing the level of secreted TNFα by T cells activated/expanded with the indicated antibody (anti-TCRβV 6-5 v1 or OKT3) and cultured with said antibody for the indicated number of days (1, 2, 3, 5, or 6). FIG. 86G is a bar graph showing the level of secreted IL-2 by T cells activated/expanded with the indicated antibody (anti-TCRβV 6-5 v1 or OKT3) and cultured with said antibody for the indicated number of days (1, 2, 3, 5, or 6).

[0423] FIG. 87A is a bar graph showing the level of secreted IFNγ by T cells activated/expanded with the indicated antibody (anti-TCRβV 6-5 v1, anti-TCRβV 6-5 v1, OKT3, SP34-2, or isotype control) and cultured with said antibody for the indicated number of days (1, 2, 3, 5, or 6). FIG. 87B is a bar graph showing the level of secreted IL-1β by T cells activated/expanded with the indicated antibody (anti-TCRβV 6-5 v1, anti-TCRβV 6-5 v1, OKT3, SP34-2, or isotype control) and cultured with said antibody for the indicated number of days (1, 2, 3, 5, or 6). FIG. 87C is a bar graph showing the level of secreted IL-4 by T cells activated/expanded with the indicated antibody (anti-TCRβV 6-5 v1, anti-TCRβV 6-5 v1, OKT3, SP34-2, or isotype control) and cultured with said antibody for the indicated number of days (1, 2, 3, 5, or 6). FIG. 87D is a bar graph showing the level of secreted IL-6 by T cells activated/expanded with the indicated antibody (anti-TCRβV 6-5 v1, anti-TCRβV 6-5 v1, OKT3, SP34-2, or isotype control) and cultured with said antibody for the indicated number of days (1, 2, 3, 5, or 6). FIG. 87E is a bar graph showing the level of secreted IL-10 by T cells activated/expanded with the indicated antibody (anti-TCRβV 6-5 v1, anti-TCRβV 6-5 v1, OKT3, SP34-2, or isotype control) and cultured with said antibody for the indicated number of days (1, 2, 3, 5, or 6). FIG. 87F is a bar graph showing the level of secreted TNFα by T cells activated/expanded with the indicated antibody (anti-TCRβV 6-5 v1, anti-TCRβV 6-5 v1, OKT3, SP34-2, or isotype control) and cultured with said antibody for the indicated number of days (1, 2, 3, 5, or 6). FIG. 87G is a bar graph showing the level of secreted IL-2 by T cells activated/expanded with the indicated antibody (anti-TCRβV 6-5 v1, anti-TCRβV 6-5 v1, OKT3, SP34-2, or isotype control) and cultured with said antibody for the indicated number of days (1, 2, 3, 5, or 6).

[0424] FIG. 88A is a bar graph showing the level of secreted IFNγ by T cells activated/expanded with the indicated antibody (anti-TCRβV 6-5 v1, anti-TCRβV 6-5 v1, OKT3, or SP34-2) and cultured with said antibody for the indicated number of days (1, 2, 3, 4, 5, 6, or 8). FIG. 88B is a bar graph showing the level of secreted IL-1β by T cells activated/expanded with the indicated antibody (anti-TCRβV 6-5 v1, anti-TCRβV 6-5 v1, OKT3, or SP34-2) and cultured with said antibody for the indicated number of days (1, 2, 3, 4, 5, 6, or 8). FIG. 88C is a bar graph showing the level of secreted IL-4 by T cells activated/expanded with the indicated antibody (anti-TCRβV 6-5 v1, anti-TCRβV 6-5 v1, OKT3, or SP34-2) and cultured with said antibody for the indicated number of days (1, 2, 3, 4, 5, 6, or 8). FIG. 88D is a bar graph showing the level of secreted IL-6 by T cells activated/expanded with the indicated antibody (anti-TCRβV 6-5 v1, anti-TCRβV 6-5 v1, OKT3, or SP34-2) and cultured with said antibody for the indicated number of days (1, 2, 3, 4, 5, 6, or 8). FIG. 88E is a bar graph showing the level of secreted IL-10 by T cells activated/expanded with the indicated antibody (anti-TCRβV 6-5 v1, anti-TCRβV 6-5 v1, OKT3, or SP34-2) and cultured with said antibody for the indicated number of days (1, 2, 3, 4, 5, 6, or 8). FIG. 88F is a bar graph showing the level of secreted TNFα by T cells activated/expanded with the indicated antibody (anti-TCRβV 6-5 v1, anti-TCRβV 6-5 v1, OKT3, or SP34-2) and cultured with said antibody for the indicated number of days (1, 2, 3, 4, 5, 6, or 8). FIG. 88G is a bar graph showing the level of secreted IL-2 by T cells activated/expanded with the indicated antibody (anti-TCRβV 6-5 v1, anti-TCRβV 6-5 v1, OKT3, or SP34-2) and cultured with said antibody for the indicated number of days (1, 2, 3, 4, 5, 6, or 8).

[0425] FIG. 89A is a bar graph showing the level of secreted IL-17A by T cells activated/expanded with the indicated antibody (anti-TCRβV 6-5 v1, OKT3, or SP34-2) and cultured with said antibody for the indicated number of days (2, 5, or 7). FIG. 89B is a bar graph showing the level of secreted IL-17A by T cells activated/expanded with the indicated antibody (anti-TCRβV 6-5 v1, OKT3, or SP34-2) and cultured with said antibody for the indicated number of days (2, 5, or 8). FIG. 89C is a bar graph showing the level of secreted IL-17A by T cells activated/expanded with the indicated antibody (anti-TCRβV 6-5 v1, OKT3, or SP34-2) and cultured with said antibody for the indicated number of days (2, 5, or 7). FIG. 89D is a bar graph showing the level of secreted IL-17A by T cells activated/expanded with the indicated antibody (anti-TCRβV 6-5 v1 or SP34-2) and cultured with said antibody for the indicated number of days (1, 3, 5, or 7).

[0426] FIG. 90A is a bar graph showing the level of secreted IFNγ by T cells activated/expanded with the indicated antibody (isotype control; anti-TCRβV 6-5 v1 with anti-BCMA antibody; anti-TCRβV 6-5 v1; anti-TCRβV 123/4 v1, or SP34-2) and cultured with said antibody for the indicated number of days (1, 2, 3, 4, 5, 6, or 8). FIG. 90B is a bar graph showing the level of secreted IL-1β by T cells activated/expanded with the indicated antibody (isotype control; anti-TCRβV 6-5 v1 with anti-BCMA antibody; anti-TCRβV 6-5 v1; anti-TCRβV 123/4 v1, or SP34-2) and cultured with said antibody for the indicated number of days (1, 2, 3, 4, 5, 6, or 8). FIG. 90C is a bar graph showing the level of secreted IL-4 by T cells activated/expanded with the indicated antibody (isotype control; anti-TCRβV 6-5 v1 with anti-BCMA antibody; anti-TCRβV 6-5 v1; anti-TCRβV 123/4 v1, or SP34-2) and cultured with said antibody for the indicated number of days (1, 2, 3, 4, 5, 6, or 8). FIG. 90D is a bar graph showing the level of secreted IL-6 by T cells activated/expanded with the indicated antibody (isotype control; anti-TCRβV 6-5 v1 with anti-BCMA antibody; anti-TCRβV 6-5 v1; anti-TCRβV 123/4 v1, or SP34-2) and cultured with said antibody for the indicated number of days (1, 2, 3, 4, 5, 6, or 8). FIG. 90E is a bar graph showing the level of secreted IL-10 by T cells activated/expanded with the indicated antibody (isotype control; anti-TCRβV 6-5 v1 with anti-BCMA antibody; anti-TCRβV 6-5 v1; anti-TCRβV 123/4 v1, or SP34-2) and cultured with said antibody for the indicated number of days (1, 2, 3, 4, 5, 6, or 8).

[0427] FIG. 90F is a bar graph showing the level of secreted TNFα by T cells activated/expanded with the indicated antibody (isotype control; anti-TCRβV 6-5 v1 with anti-BCMA antibody; anti-TCRβV 6-5 v1; anti-TCRβV 123/4 v1, or SP34-2) and cultured with said antibody for the indicated number of days (1, 2, 3, 4, 5, 6, or 8). FIG. 90G is a bar graph showing the level of secreted IL-2 by T cells activated/expanded with the indicated antibody (isotype control; anti-TCRβV 6-5 v1 with anti-BCMA antibody; anti-TCRβV 6-5 v1; anti-TCRβV 123/4 v1, or SP34-2) and cultured with said antibody for the indicated number of days (1, 2, 3, 4, 5, 6, or 8). FIG. 90H is a bar graph showing the level of secreted IL-12p70 by T cells activated/expanded with the indicated antibody (isotype control; anti-TCRβV 6-5 v1 with anti-BCMA antibody; anti-TCRβV 6-5 v1; anti-TCRβV 123/4 v1, or SP34-2) and cultured with said antibody for the indicated number of days (1, 2, 3, 4, 5, 6, or 8). FIG. 90I is a bar graph showing the level of secreted IL-13 by T cells activated/expanded with the indicated antibody (isotype control; anti-TCRβV 6-5 v1 with anti-BCMA antibody; anti-TCRβV 6-5 v1; anti-TCRβV 123/4 v1, or SP34-2) and cultured with said antibody for the indicated number of days (1, 2, 3, 4, 5, 6, or 8). FIG. 90J is a bar graph showing the level of secreted IL-8 by T cells activated/expanded with the indicated antibody (isotype control; anti-TCRβV 6-5 v1 with anti-BCMA antibody; anti-TCRβV 6-5 v1; anti-TCRβV 123/4 v1, or SP34-2) and cultured with said antibody for the indicated number of days (1, 2, 3, 4, 5, 6, or 8). FIG. 90K is a bar graph showing the level of secreted exotaxin by T cells activated/expanded with the indicated antibody (isotype control; anti-TCRβV 6-5 v1 with anti-BCMA antibody; anti-TCRβV 6-5 v1; anti-TCRβV 123/4 v1, or SP34-2) and cultured with said antibody for the indicated number of days (1, 2, 3, 4, 5, 6, or 8). FIG. 90L is a bar graph showing the level of secreted exotoxin-3 by T cells activated/expanded with the indicated antibody (isotype control; anti-TCRβV 6-5 v1 with anti-BCMA antibody; anti-TCRβV 6-5 v1; anti-TCRβV 123/4 v1, or SP34-2) and cultured with said antibody for the indicated number of days (1, 2, 3, 4, 5, 6, or 8). FIG. 90M is a bar graph showing the level of secreted IL-8 by T cells activated/expanded with the indicated antibody (isotype control; anti-TCRβV 6-5 v1 with anti-BCMA antibody; anti-TCRβV 6-5 v1; anti-TCRβV 123/4 v1, or SP34-2) and cultured with said antibody for the indicated number of days (1, 2, 3, 4, 5, 6, or 8). FIG. 90N is a bar graph showing the level of secreted IP-10 by T cells activated/expanded with the indicated antibody (isotype control; anti-TCRβV 6-5 v1 with anti-BCMA antibody; anti-TCRβV 6-5 v1; anti-TCRβV 123/4 v1, or SP34-2) and cultured with said antibody for the indicated number of days (1, 2, 3, 4, 5, 6, or 8). FIG. 90O is a bar graph showing the level of secreted MCP-1 by T cells activated/expanded with the indicated antibody (isotype control; anti-TCRβV 6-5 v1 with anti-BCMA antibody; anti-TCRβV 6-5 v1; anti-TCRβV 123/4 v1, or SP34-2) and cultured with said antibody for the indicated number of days (1, 2, 3, 4, 5, 6, or 8). FIG. 90P is a bar graph showing the level of secreted MCP-4 by T cells activated/expanded with the indicated antibody (isotype control; anti-TCRβV 6-5 v1 with anti-BCMA antibody; anti-TCRβV 6-5 v1; anti-TCRβV 123/4 v1, or SP34-2) and cultured with said antibody for the indicated number of days (1, 2, 3, 4, 5, 6, or 8). FIG. 90Q is a bar graph showing the level of secreted MDC by T cells activated/expanded with the indicated antibody (isotype control; anti-TCRβV 6-5 v1 with anti-BCMA antibody; anti-TCRβV 6-5 v1; anti-TCRβV 123/4 v1, or SP34-2) and cultured with said antibody for the indicated number of days (1, 2, 3, 4, 5, 6, or 8). FIG. 90R is a bar graph showing the level of secreted MIP-1a by T cells activated/expanded with the indicated antibody (isotype control; anti-TCRβV 6-5 v1 with anti-BCMA antibody; anti-TCRβV 6-5 v1; anti-TCRβV 123/4 v1, or SP34-2) and cultured with said antibody for the indicated number of days (1, 2, 3, 4, 5, 6, or 8). FIG. 90S is a bar graph showing the level of secreted MIP-1b by T cells activated/expanded with the indicated antibody (isotype control; anti-TCRβV 6-5 v1 with anti-BCMA antibody; anti-TCRβV 6-5 v1; anti-TCRβV 123/4 v1, or SP34-2) and cultured with said antibody for the indicated number of days (1, 2, 3, 4, 5, 6, or 8). FIG. 90T is a bar graph showing the level of secreted TARC by T cells activated/expanded with the indicated antibody (isotype control; anti-TCRβV 6-5 v1 with anti-BCMA antibody; anti-TCRβV 6-5 v1; anti-TCRβV 123/4 v1, or SP34-2) and cultured with said antibody for the indicated number of days (1, 2, 3, 4, 5, 6, or 8). FIG. 90U is a bar graph showing the level of secreted GMCSF by T cells activated/expanded with the indicated antibody (isotype control; anti-TCRβV 6-5 v1 with anti-BCMA antibody; anti-TCRβV 6-5 v1; anti-TCRβV 123/4 v1, or SP34-2) and cultured with said antibody for the indicated number of days (1, 2, 3, 4, 5, 6, or 8). FIG. 90V is a bar graph showing the level of secreted IL-12-23p40 by T cells activated/expanded with the indicated antibody (isotype control; anti-TCRβV 6-5 v1 with anti-BCMA antibody; anti-TCRβV 6-5 v1; anti-TCRβV 123/4 v1, or SP34-2) and cultured with said antibody for the indicated number of days (1, 2, 3, 4, 5, 6, or 8). FIG. 90W is a bar graph showing the level of secreted IL-15 by T cells activated/expanded with the indicated antibody (isotype control; anti-TCRβV 6-5 v1 with anti-BCMA antibody; anti-TCRβV 6-5 v1; anti-TCRβV 123/4 v1, or SP34-2) and cultured with said antibody for the indicated number of days (1, 2, 3, 4, 5, 6, or 8). FIG. 90X is a bar graph showing the level of secreted IL-16 by T cells activated/expanded with the indicated antibody (isotype control; anti-TCRβV 6-5 v1 with anti-BCMA antibody; anti-TCRβV 6-5 v1; anti-TCRβV 123/4 v1, or SP34-2) and cultured with said antibody for the indicated number of days (1, 2, 3, 4, 5, 6, or 8). FIG. 90Y is a bar graph showing the level of secreted IL-17a by T cells activated/expanded with the indicated antibody (isotype control; anti-TCRβV 6-5 v1 with anti-BCMA antibody; anti-TCRβV 6-5 v1; anti-TCRβV 123/4 v1, or SP34-2) and cultured with said antibody for the indicated number of days (1, 2, 3, 4, 5, 6, or 8). FIG. 90Z is a bar graph showing the level of secreted IL-1a by T cells activated/expanded with the indicated antibody (isotype control; anti-TCRβV 6-5 v1 with anti-BCMA antibody; anti-TCRβV 6-5 v1; anti-TCRβV 123/4 v1, or SP34-2) and cultured with said antibody for the indicated number of days (1, 2, 3, 4, 5, 6, or 8). FIG. 90AA is a bar graph showing the level of secreted IL-5 by T cells activated/expanded with the indicated antibody (isotype control; anti-TCRβV 6-5 v1 with anti-BCMA antibody; anti-TCRβV 6-5 v1; anti-TCRβV 123/4 v1, or SP34-2) and cultured with said antibody for the indicated number of days (1, 2, 3, 4, 5, 6, or 8). FIG. 90BB is a bar graph showing the level of secreted IL-7 by T cells activated/expanded with the indicated antibody (isotype control; anti-TCRβV 6-5 v1 with anti-BCMA antibody; anti-TCRβV 6-5 v1; anti-TCRβV 123/4 v1, or SP34-2) and cultured with said antibody for the indicated number of days (1, 2, 3, 4, 5, 6, or 8). FIG. 90CC is a bar graph showing the level of secreted TNF-β by T cells activated/expanded with the indicated antibody (isotype control; anti-TCRβV 6-5 v1 with anti-BCMA antibody; anti-TCRβV 6-5 v1; anti-TCRβV 123/4 v1, or SP34-2) and cultured with said antibody for the indicated number of days (1, 2, 3, 4, 5, 6, or 8). FIG. 90DD is a bar graph showing the level of secreted VEGF by T cells activated/expanded with the indicated antibody (isotype control; anti-TCRβV 6-5 v1 with anti-BCMA antibody; anti-TCRβV 6-5 v1; anti-TCRβV 123/4 v1, or SP34-2) and cultured with said antibody for the indicated number of days (1, 2, 3, 4, 5, 6, or 8).

[0428] FIG. 91 shows a graphical representation of the relation of sequences between different TCRVB clonotype subfamilies.

[0429] FIG. 92A is a bar graph showing the percentage of cytokine release from PBMCs activated/expanded for eight days using the indicated antibody (anti-TCRβV 12-3/4 v1 or SP34-2). FIG. 92B is a bar graph showing the percentage of cytokine release from PBMCs activated/expanded for eight days using the indicated antibody (anti-TCRβV 5 or SP34-2). FIG. 92C is a bar graph showing the percentage of cytokine release from PBMCs activated/expanded for eight days using the indicated antibody (anti-TCRβV 10 or SP34-2).

[0430] FIG. 93A a bar graph showing the level of secreted IFNγ by T cells activated/expanded with the indicated antibody for the indicated number of days (3 or 6). FIG. 93B a bar graph showing the level of secreted IL-10 by T cells activated/expanded with the indicated antibody for the indicated number of days (3 or 6). FIG. 93C a bar graph showing the level of secreted IL-17A by T cells activated/expanded with the indicated antibody for the indicated number of days (3 or 6). FIG. 93D a bar graph showing the level of secreted IL-1α by T cells activated/expanded with the indicated antibody for the indicated number of days (3 or 6). FIG. 93E a bar graph showing the level of secreted IL-1β by T cells activated/expanded with the indicated antibody for the indicated number of days (3 or 6). FIG. 93F a bar graph showing the level of secreted IL-6 by T cells activated/expanded with the indicated antibody for the indicated number of days (3 or 6). FIG. 93G a bar graph showing the level of secreted TNFα by T cells activated/expanded with the indicated antibody for the indicated number of days (3 or 6). FIG. 93H a bar graph showing the level of secreted IL-2 by T cells activated/expanded with the indicated antibody for the indicated number of days (3 or 6).

[0431] FIG. 94 is a bar graph summarizing data from FACS analysis of PBMCs activated/expanded for 6 days using the indicated anti-TCRVβ antibody.

[0432] FIG. 95A a bar graph showing the level of secreted IFNγ by T cells activated/expanded with the indicated antibody for the indicated number of days (1, 3, 5, or 7). FIG. 95B a bar graph showing the level of secreted IL-10 by T cells activated/expanded with the indicated antibody for the indicated number of days (1, 3, 5, or 7). FIG. 95C a bar graph showing the level of secreted IL-17A by T cells activated/expanded with the indicated antibody for the indicated number of days (1, 3, 5, or 7). FIG. 95D a bar graph showing the level of secreted IL-1α by T cells activated/expanded with the indicated antibody for the indicated number of days (1, 3, 5, or 7). FIG. 95E a bar graph showing the level of secreted IL-1β by T cells activated/expanded with the indicated antibody for the indicated number of days (1, 3, 5, or 7). FIG. 95F a bar graph showing the level of secreted IL-6 by T cells activated/expanded with the indicated antibody for the indicated number of days (1, 3, 5, or 7). FIG. 95G a bar graph showing the level of secreted IL-4 by T cells activated/expanded with the indicated antibody for the indicated number of days (1, 3, 5, or 7). FIG. 95H a bar graph showing the level of secreted IL-2 by T cells activated/expanded with the indicated antibody for the indicated number of days (1, 3, 5, or 7).

[0433] FIG. 96 is a bar graph summarizing data from FACS analysis of PBMCs activated/expanded for 7 days using the indicated anti-TCRVβ antibody.

[0434] FIG. 97A is a bar graph showing the level of secreted IFNγ by T cells activated/expanded with the indicated antibody for the indicated number of days (3 or 6). FIG. 97B a bar graph showing the level of secreted IL-10 by T cells activated/expanded with the indicated antibody for the indicated number of days (3 or 6). FIG. 97C a bar graph showing the level of secreted IL-17A by T cells activated/expanded with the indicated antibody for the indicated number of days (3 or 6). FIG. 97D a bar graph showing the level of secreted IL-1a by T cells activated/expanded with the indicated antibody for the indicated number of days (3 or 6). FIG. 97E a bar graph showing the level of secreted IL-10β by T cells activated/expanded with the indicated antibody for the indicated number of days (3 or 6). FIG. 97F a bar graph showing the level of secreted IL-6 by T cells activated/expanded with the indicated antibody for the indicated number of days (3 or 6). FIG. 97G a bar graph showing the level of secreted IL-4 by T cells activated/expanded with the indicated antibody for the indicated number of days (3 or 6). FIG. 97H a bar graph showing the level of secreted TNFα by T cells activated/expanded with the indicated antibody for the indicated number of days (3 or 6). FIG. 97I a bar graph showing the level of secreted IL-2 by T cells activated/expanded with the indicated antibody for the indicated number of days (3 or 6).

[0435] FIG. 98A is a bar graph showing the level of secreted IFN-γ by T cells activated/expanded with the indicated antibody (anti-TCRβV 6-5 v1 (plate coated), anti-CD3ε (plate coated), anti-TCRβV 6-5 v1 (in solution), or anti-CD3ε (in solution) and cultured with said antibody for the indicated number of days (1, 3, 5, or 7). FIG. 98B is a bar graph showing the level of secreted IFN-γ by T cells activated/expanded with the indicated antibody (anti-TCRβV 6-5 v1 (plate coated), anti-CD3ε (plate coated), anti-TCRβV 6-5 v1 (in solution), or anti-CD3ε (in solution) and cultured with said antibody for the indicated number of days (1, 3, 5, or 7). FIG. 98C is a bar graph showing the level of secreted IL-1b by T cells activated/expanded with the indicated antibody (anti-TCRβV 6-5 v1 (plate coated), anti-CD3ε (plate coated), anti-TCRβV 6-5 v1 (in solution), or anti-CD3ε (in solution) and cultured with said antibody for the indicated number of days (1, 3, 5, or 7). FIG. 98D is a bar graph showing the level of secreted IL-6 by T cells activated/expanded with the indicated antibody (anti-TCRβV 6-5 v1 (plate coated), anti-CD3ε (plate coated), anti-TCRβV 6-5 v1 (in solution), or anti-CD3ε (in solution) and cultured with said antibody for the indicated number of days (1, 3, 5, or 7). FIG. 98E is a bar graph showing the level of secreted IL-10 by T cells activated/expanded with the indicated antibody (anti-TCRβV 6-5 v1 (plate coated), anti-CD3ε (plate coated), anti-TCRβV 6-5 v1 (in solution), or anti-CD3ε (in solution) and cultured with said antibody for the indicated number of days (1, 3, 5, or 7). FIG. 98F is a bar graph showing the level of secreted IL-15 by T cells activated/expanded with the indicated antibody (anti-TCRβV 6-5 v1 (plate coated), anti-CD3ε (plate coated), anti-TCRβV 6-5 v1 (in solution), or anti-CD3 (in solution) and cultured with said antibody for the indicated number of days (1, 3, 5, or 7).

[0436] FIG. 98G is a bar graph showing the level of secreted IL-17A by T cells activated/expanded with the indicated antibody (anti-TCRβV 6-5 v1 (plate coated), anti-CD3ε (plate coated), anti-TCRβV 6-5 v1 (in solution), or anti-CD3ε (in solution) and cultured with said antibody for the indicated number of days (1, 3, 5, or 7). FIG. 98H is a bar graph showing the level of secreted IL-1a by T cells activated/expanded with the indicated antibody (anti-TCRβV 6-5 v1 (plate coated), anti-CD3ε (plate coated), anti-TCRβV 6-5 v1 (in solution), or anti-CD3ε (in solution) and cultured with said antibody for the indicated number of days (1, 3, 5, or 7). FIG. 98I is a bar graph showing the level of secreted IL-1b by T cells activated/expanded with the indicated antibody (anti-TCRβV 6-5 v1 (plate coated), anti-CD3ε (plate coated), anti-TCRβV 6-5 v1 (in solution), or anti-CD3ε (in solution) and cultured with said antibody for the indicated number of days (1, 3, 5, or 7). FIG. 98J is a bar graph showing the level of secreted IL-2 by T cells activated/expanded with the indicated antibody (anti-TCRβV 6-5 v1 (plate coated), anti-CD3ε (plate coated), anti-TCRβV 6-5 v1 (in solution), or anti-CD3ε (in solution) and cultured with said antibody for the indicated number of days (1, 3, 5, or 7). FIG. 98K is a bar graph showing the level of secreted IL-4 by T cells activated/expanded with the indicated antibody (anti-TCRβV 6-5 v1 (plate coated), anti-CD3ε (plate coated), anti-TCRβV 6-5 v1 (in solution), or anti-CD3ε (in solution) and cultured with said antibody for the indicated number of days (1, 3, 5, or 7). FIG. 98L is a bar graph showing the level of secreted TNF-α by T cells activated/expanded with the indicated antibody (anti-TCRβV 6-5 v1 (plate coated), anti-CD3ε (plate coated), anti-TCRβV 6-5 v1 (in solution), or anti-CD3ε (in solution) and cultured with said antibody for the indicated number of days (1, 3, 5, or 7).

[0437] FIG. 99 is a FACS plot showing the showing the ability of MH3-2 to bind PBMCs from one of two donors when the PBMCs are either preincubated with TM23 or not (MH3-2 Alone).

[0438] FIG. 100 is a FACS plot showing the ability of MH3-2 to bind PBMCs from one of two donors when the PBMCs are either preincubated with TM23 or not (MH3-2 Alone).

[0439] FIG. 101A is a bar graph showing the polyfunctional strength index (PSI) of PBMC CD4+ T cells, CD4+ T cells expanded with anti-CD3 antibody, (CD3 Expanded T cells), and CD4+ T cells expanded with anti-TCRVβ 6-5 antibody (Drug Expanded T cells). The Effector mediators are Granzyme B, IFNγ, MIP-1a, perforin, TNFα, and TNFβ. The Stimulatory mediators are IL-5. The Chemoattractive mediators are MIP-1b. FIG. 101B is a bar graph showing the polyfunctional strength index (PSI) of PBMC CD8+ T cells, CD8+ T cells expanded with anti-CD3 antibody, (CD3 Expanded T cells), and CD8+ T cells expanded with anti-TCRVβ 6-5 antibody (Drug Expanded T cells). The Effector mediators are Granzyme B, IFNγ, MIP-1a, perforin, and TNFβ. The Chemoattractive mediators are MIP-1b and RANTES.

[0440] FIGS. 102A-102C show binding of a CD19×TCRvβ bispecific molecule to a TCR molecule. FIG. 102A is a schematic of the bispecific molecule used in this study. FIG. 102B is a graph showing the binding of a CD19×TCRvβ bispecific molecule to soluble TCR. FIG. 102C is a graph showing binding of a CD19×TCRvβ bispecific molecule to TCR expressed on Jurkat cells.

[0441] FIGS. 103A-103D show the characterization of a murine CD19×TCRvβ13-2/3 (2×2) bispecific molecule. FIG. 103A is a schematic of the bispecific molecule used in this study. FIG. 103B is a graph showing the binding kinetics of murine CD19×TCRvβ13-2/3. FIG. 103C are dot plots showing the expansion of TCRVB+ T cells following a 6 day incubation with murine CD19×TCRvβ13-2/3. FIG. 103D is a graph showing the relative count of splenic B cells after a 6 day in vitro incubation with murine CD19×TCRvβ13-2/3 bispecific antibody.

[0442] FIG. 104 are graphs showing the level of B cells in the blood or spleen of animals treated with 0.1 mg per kg or 1 mg per kg of a murine CD19×TCRvβ13-2/3 bispecific antibody.

[0443] FIGS. 105A-105B are graphs showing the level of NK cells (FIG. 105A) or T cells (FIG. 105B) in the blood or spleen of animals treated with 0.1 mg per kg or 1 mg per kg of a murine CD19×TCRvβ13-2/3 bispecific antibody.

[0444] FIGS. 106A-106F show expansion of TCRVB+ T cells and lysis of target cells with a CD19×TCRvβ bispecific molecule. FIG. 106A is a schematic of the bispecific molecule used in this study. FIG. 106B is a graph showing target cell lysis by pre-expanded TCRVB+ T cells or CD3+ expanded pan T cells. FIG. 106C shows depletion of purified B cells by purified T cells treated with a CD19×TCRvβ bispecific molecule. FIG. 106D shows depletion of purified B cells by purified T cells treated with a CD19×CD3 bispecific molecule. FIG. 106E shows depletion of B cells in a PBMC preparation treated with a CD19×TCRvβ bispecific molecule. FIG. 106F shows depletion of B cells in a PBMC preparation treated with a CD19×CD3 bispecific molecule.

[0445] FIGS. 107A-107B are graphs showing the expression of various cytokines from PBMCs treated with a CD19×CD3 bispecific molecule (FIG. 107A) or a CD19×TCRVB 6-5 bispecific molecule (FIG. 107B).

[0446] FIGS. 108A-108C show a CD19×TCRβ6-5 (2×2) pharmacokinetic (PK) profile and dosing strategy. FIG. 108A is a schematic of the experimental design. FIG. 108B is a graph showing the concentration of CD19×TCRβ6-5 at the indicated timepoints after treatment. FIG. 108C shows the detection reagents used to detect CD19×TCRβ6-5.

[0447] FIG. 109 depicts Table 9 showing the alignment of TCRBV amino acid sequences (SEQ ID NOs: 3457-3516, respectively, in order of appearance).

[0448] FIGS. 110A and 110B show the alignment of affinity matured humanized Antibody A-H VL and VH sequences. FIG. 110A shows the alignment of affinity matured humanized Antibody A-H VL sequences (SEQ ID NOS 3377-3389, respectively, in order of appearance), and consensus VL sequence SEQ ID NO: 230, and consensus VL sequence SEQ ID NO: 3289. FIG. 110B shows the alignment of affinity matured humanized Antibody A-H VH sequences (SEQ ID NOS 3390-3436, respectively, in order of appearance), and consensus VH sequence SEQ ID NO: 231 and consensus VH sequence SEQ ID NO: 3290.

### DETAILED DESCRIPTION OF THE INVENTION

[0449] Current bispecific constructs designed to redirect T cells to promote tumor cell lysis for cancer immunotherapy typically utilize antibody fragments (Fab, scFv, VH, etc.) that are derived from monoclonal antibodies (mAb) directed against the CD3e subunit of the T cell receptor (TCR). However, there are limitations to this approach which may prevent the full realization of the therapeutic potential for such bispecific constructs. Previous studies have shown that even low “activating” doses of anti-CD3e mAb can cause long-term T cell dysfunction and exert immunosuppressive effects. In addition, anti-CD3e mAbs have been associated with side effects that result from massive T cell activation. The large number of activated T cells secrete substantial amounts of cytokines, the most important of which is Interferon gamma (IFNg). This excess amount of IFNg in turn activates macrophages which then overproduce proinflammatory cytokines such as IL-1beta, IL-6, IL-10 and TNF-alpha, causing a “cytokine storm” known as the cytokine release syndrome (CRS) (Shimabukuro-Vornhagen et al., J Immunother Cancer. 2018 Jun. 15; 6(1):56, herein incorporated by reference in its entirety). Thus, the need exists for developing antibodies that are capable of binding and activating only a subset of effector T cells, e.g., to reduce the CRS and/or neurotoxicity (NT).

[0450] This invention features molecules targeting the TCRβV chain of TCR and methods thereof. Without wishing to be bound by theory, such molecules are capable of binding, activating, and/or expanding only a subset of T cells, avoiding or reducing CRS and/or NT and minimizing potential immunosuppressive effects of anti-CD3 mAbs.

[0451] TCR is a disulfide-linked membrane-anchored heterodimeric protein normally consisting of the highly variable alpha (α) and beta (β) chains expressed as part of a complex with the invariant CD3 chain molecules. TCR on αβ T cells is formed by a heterodimer of one alpha chain and one beta chain. Each alpha or beta chain consists of a constant domain and a highly variable domain classified as the Immunoglobulin superfamily (IgSF) fold. The TCRβV chains can be further classified into 30 subfamilies (TRBV1-30). Despite their high structural and functional homology, the amino acid sequence homology in the TRBV genes is very low. Only 4 amino acids out of ˜95 are identical while 10 additional amino acids are conserved among all subfamilies (see an alignment of TCRBV amino acid sequences in Table 9). Nevertheless, TCRs formed between alpha and beta chains of highly diverse sequences show a remarkable structural homology (FIGS. 24A and 24B) and elicit a similar function, e.g., activation of T cells.

[0452] Disclosed herein is the discovery of a novel class of antibodies, i.e., anti-TCRβV antibody molecules disclosed herein, which despite having low sequence similarity (e.g., low sequence identity among the different antibody molecules that recognize different TCRβV subfamilies), recognize a structurally conserved, yet sequence-wise variable, region, e.g., domain, on the TCRβV protein (as denoted by the circled area in FIG. 24A) and have a similar function (e.g., activation of T cells and a similar cytokine profile as described herein). Thus, the anti-TCRβV antibody molecules disclosed herein share a structure-function relationship.

[0453] Without wishing to be bound by theory, it is believed that in some embodiments, the anti-TCRβV antibody molecules disclosed herein bind to an outward facing epitope of a TCRβV protein when it is in a complex with a TCRalpha protein, e.g., as denoted by the circled area in FIG. 24A. In some embodiments, the anti-TCRβV antibody molecules disclosed herein recognize (e.g., bind to), a domain (e.g., an epitope) on the TCRβV protein that is: (1) structurally conserved among different TCRβV subfamilies; and (2) has minimal sequence identity among the different TCRβV subfamilies. As shown in Table 9, TCRβV proteins from the different TCRBV subfamilies share minimal sequence similarity. However, as shown in FIG. 24A-B, TCRβV proteins which have minimal sequence similarity, share a similar 3D conformation and structure.

[0454] In some embodiments, the anti-TCRβV antibody molecules disclosed herein do not recognize, e.g., bind to, an interface of a TCRβV:TCRalpha complex.

[0455] In some embodiments, the anti-TCRβV antibody molecules disclosed herein do not recognize, e.g., bind to, a constant region of a TCRβV protein.

[0456] In some embodiments, the anti-TCRβV antibody molecules disclosed herein do not recognize, e.g., bind to, one or more (e.g., all) of a complementarity determining region (e.g., CDR1, CDR2 and/or CDR3) of a TCRβV protein.

[0457] This disclosure provides, inter alia, antibody molecules directed to the variable chain of the beta subunit of TCR (TCRβV) which bind and, e.g., activate a subset of T cells. The anti-TCRβV antibody molecules disclosed herein result in lesser or no production of cytokines associated with CRS, e.g., IL-6, IL-1beta, IL-10 and TNF alpha; and enhanced and/or delayed production of IL-2 and IFNg. In some embodiments, the anti-TCRβV antibodies disclosed herein have a cytokine profile, e.g., as described herein, which differs from a cytokine profile of a T cell engager that binds to a receptor or molecule other than a TCRβV region (“a non-TCRβV-binding T cell engager”). In some embodiments, the anti-TCRβV antibodies disclosed herein result in expansion of TCRβV+ T cells, e.g., a subset of memory effector T cells known as TEMRA. Without wishing to be bound by theory, it is believed that in some embodiments, TEMRA cells can promote tumor cell lysis but not CRS. Accordingly, provided herein are methods of making said anti-TCRβV antibody molecules and uses thereof. Also disclosed herein are multispecific molecules, e.g., bispecific molecules comprising said anti-TCRβV antibody molecules. In some embodiments, compositions comprising anti-TCRβV antibody molecules of the present disclosure, can be used, e.g., to: (1) activate and redirect T cells to promote tumor cell lysis for cancer immunotherapy; and/or (2) expand TCRβV+ T cells. In some embodiments, compositions comprising anti-TCRβV antibody molecules as disclosed herein limit the harmful side-effects of CRS and/or NT, e.g., CRS and/or NT associated with anti-CD3e targeting.

[0458] In some embodiments, the anti-TCRβV antibody molecule does not bind to TCRβ V12, or binds to TCRβ V12 with an affinity and/or binding specificity that is less than (e.g., less than about 10%, 20%, 30%, 40%, 50%, 60%, 70%, 80%, 90% or about 2-, 5-, or 10-fold) the affinity and/or binding specificity of the 16G8 murine antibody or a humanized version thereof as described in U.S. Pat. No. 5,861,155.

[0459] In some embodiments, the anti-TCRβV antibody molecule binds to TCRβ V12 with an affinity and/or binding specificity that is greater than (e.g., greater than about 10%, 20%, 30%, 40%, 50%, 60%, 70%, 80%, 90% or about 2-, 5-, or 10-fold) the affinity and/or binding specificity of the 16G8 murine antibody or a humanized version thereof as described in U.S. Pat. No. 5,861,155.

[0460] In some embodiments, the anti-TCRβV antibody molecule binds to a TCRβV region other than TCRβ V12 (e.g., TCRβV region as described herein, e.g., TCRβ V6 subfamily (e.g., TCRβ V6-5*01) with an affinity and/or binding specificity that is greater than (e.g., greater than about 10%, 20%, 30%, 40%, 50%, 60%, 70%, 80%, 90% or about 2-, 5-, or 10-fold) the affinity and/or binding specificity of the 16G8 murine antibody or a humanized version thereof as described in U.S. Pat. No. 5,861,155.

[0461] In some embodiments, the anti-TCRβV antibody molecule does not comprise the CDRs of the Antibody B murine antibody.

[0462] In some embodiments, the anti-TCRβV antibody molecule does not bind to TCRβ V5-5*01 or TCRβ V5-1*01, or binds to TCRβ V5-5*01 or TCRβ V5-1*01 with an affinity and/or binding specificity that is less than (e.g., less than about 10%, 20%, 30%, 40%, 50%, 60%, 70%, 80%, 90% or about 2-, 5-, or 10-fold) the affinity and/or binding specificity of the TM23 murine antibody or a humanized version thereof as described in U.S. Pat. No. 5,861,155.

[0463] In some embodiments, the anti-TCRβV antibody molecule binds to TCRβ V5-5*01 or TCRβ V5-1*01 with an affinity and/or binding specificity that is greater than (e.g., greater than about 10%, 20%, 30%, 40%, 50%, 60%, 70%, 80%, 90% or about 2-, 5-, or 10-fold) the affinity and/or binding specificity of the TM23 murine antibody or a humanized version thereof as described in U.S. Pat. No. 5,861,155.

[0464] In some embodiments, the anti-TCRβV antibody molecule binds to a TCRβV region other than TCRβ V5-5*01 or TCRβ V5-1*01 (e.g., TCRβV region as described herein, e.g., TCRβ V6 subfamily (e.g., TCRβ V6-5*01) with an affinity and/or binding specificity that is greater than (e.g., greater than about 10%, 20%, 30%, 40%, 50%, 60%, 70%, 80%, 90% or about 2-, 5-, or 10-fold) the affinity and/or binding specificity of the TM23 murine antibody or a humanized version thereof as described in U.S. Pat. No. 5,861,155.

[0465] In some embodiments, the anti-TCRβV antibody molecule does not comprise the CDRs of the TM23 murine antibody.

[0466] Accordingly, provided herein are, inter alia, anti-TCRβV antibody molecules, multispecific or multifunctional molecules (e.g., multispecific or multifunctional antibody molecules) that comprise anti-TCRβV antibody molecules, nucleic acids encoding the same, methods of producing the aforesaid molecules, pharmaceutical compositions comprising aforesaid molecules, and methods of treating a disease or disorder, e.g., cancer, using the aforesaid molecules. The antibody molecules and pharmaceutical compositions disclosed herein can be used (alone or in combination with other agents or therapeutic modalities) to treat, prevent and/or diagnose disorders and conditions, e.g., cancer, e.g., as described herein.

### Definitions

[0467] Unless defined otherwise, all technical and scientific terms used herein have the same meaning as commonly understood by one of ordinary skill in the art to which the invention pertains.

[0468] The term “a” and “an” refers to one or to more than one (i.e., to at least one) of the grammatical object of the article. By way of example, “an element” means one element or more than one element.

[0469] The term “about” when referring to a measurable value such as an amount, a temporal duration, and the like, is meant to encompass variations of ±20% or in some instances ±10%, or in some instances ±5%, or in some instances ±1%, or in some instances ±0.1% from the specified value, as such variations are appropriate to perform the disclosed methods.

[0470] The term “acquire” or “acquiring” as the terms are used herein, refer to obtaining possession of a physical entity (e.g., a sample, a polypeptide, a nucleic acid, or a sequence), or a value, e.g., a numerical value, by “directly acquiring” or “indirectly acquiring” the physical entity or value. “Directly acquiring” means performing a process (e.g., performing a synthetic or analytical method) to obtain the physical entity or value. “Indirectly acquiring” refers to receiving the physical entity or value from another party or source (e.g., a third party laboratory that directly acquired the physical entity or value). Directly acquiring a physical entity includes performing a process that includes a physical change in a physical substance, e.g., a starting material. Directly acquiring a value includes performing a process that includes a physical change in a sample or another substance, e.g., performing an analytical process which includes a physical change in a substance, e.g., a sample.

[0471] As used herein, the term “T cell receptor beta variable chain” or “TCRβV,” refers to an extracellular region of the T cell receptor beta chain which comprises the antigen recognition domain of the T cell receptor. The term TCRβV includes isoforms, mammalian, e.g., human TCRβV, species homologs of human and analogs comprising at least one common epitope with TCRβV. Human TCRβV comprises a gene family comprising subfamilies including, but not limited to: a TCRβ V6 subfamily, a TCRβ V10 subfamily, a TCRβ V12 subfamily, a TCRβ V5 subfamily, a TCRβ V7 subfamily, a TCRβ V11 subfamily, a TCRβ V14 subfamily, a TCRβ V16 subfamily, a TCRβ V18 subfamily, a TCRβ V9 subfamily, a TCRβ V13 subfamily, a TCRβ V4 subfamily, a TCRβ V3 subfamily, a TCRβ V2 subfamily, a TCRβ V15 subfamily, a TCRβ V30 subfamily, a TCRβ V19 subfamily, a TCRβ V27 subfamily, a TCRβ V28 subfamily, a TCRβ V24 subfamily, a TCRβ V20 subfamily, TCRβ V25 subfamily, a TCRβ V29 subfamily, a TCRβ V1 subfamily, a TCRβ V17 subfamily, a TCRβ V21 subfamily, a TCRβ V23 subfamily, or a TCRβ V26 subfamily, as well as family members of said subfamilies, and variants thereof (e.g., a structural or functional variant thereof). In some embodiments, the TCRβ V6 subfamily comprises: TCRβ V6-4*01, TCRβ V6-4*02, TCRβ V6-9*01, TCRβ V6-8*01, TCRβ V6-5*01, TCRβ V6-6*02, TCRβ V6-6*01, TCRβ V6-2*01, TCRβ V6-3*01 or TCRβ V6-1*01. In some embodiments, TCRβV comprises TCRβ V6-5*01, or a variant thereof, e.g., a variant having 85%, 90%, 95%, 99% or more identity the naturally-occurring sequence. TCRβ V6-5*01 is also known as TRBV65; TCRBV6S5; TCRBV13S1, or TCRβ V13.1. The amino acid sequence of TCRβ V6-5*01, e.g., human TCRβ V6-5*01, is known in that art, e.g., as provided by IMGT ID L36092. In some embodiments, TCRβ V6-5*01 is encoded by the nucleic acid sequence of SEQ ID NO: 43, or a sequence having 85%, 90%, 95%, 99% or more identity thereof. In some embodiments, TCRβ V6-5*01 comprises the amino acid sequence of SEQ ID NO: 44, or a sequence having 85%, 90%, 95%, 99% or more identity thereof.

[0472] The term “human-like antibody molecule” as used herein refers to a humanized antibody molecule, human antibody molecule or an antibody molecule having at least 95% identity with a non-murine germline framework region, e.g., FR1, FR2, FR3 and/or FR4. In some embodiments, the human-like antibody molecule comprises a framework region having at least 95% identity to a human germline framework region, e.g., a FR1, FR2, FR3 and/or FR4 of a human germline framework region. In some embodiments, the human-like antibody molecule is a recombinant antibody. In some embodiments, the human-like antibody molecule is a humanized antibody molecule. In some embodiments, the human-like antibody molecule is human antibody molecule. In some embodiments, the human-like antibody molecule is a phage display or a yeast display antibody molecule. In some embodiments, the human-like antibody molecule is a chimeric antibody molecule. In some embodiments, the human-like antibody molecule is a CDR grafted antibody molecule.

[0473] The term “cytokine profile” as used herein, refers to the level and/or activity of on one or more cytokines or chemokines, e.g., as described herein. In some embodiments, a cytokine profile comprises the level and/or activity of a naturally occurring cytokine, a fragment or a variant thereof. In an embodiment, a cytokine profile comprises the level and/or activity of one or more cytokines and/or one or more chemokines (e.g., as described herein). In some embodiments, a cytokine profile comprises the level and/or activity of a naturally occurring cytokine, a fragment or a variant thereof. In some embodiments, a cytokine profile comprises the level and/or activity of a naturally occurring chemokine, a fragment or a variant thereof. In an embodiment, a cytokine profile comprises the level and/or activity of one or more of: IL-2 (e.g., full length, a variant, or a fragment thereof); IL-1beta (e.g., full length, a variant, or a fragment thereof); IL-6 (e.g., full length, a variant, or a fragment thereof); TNFα (e.g., full length, a variant, or a fragment thereof); IFNg (e.g., full length, a variant, or a fragment thereof) IL-10 (e.g., full length, a variant, or a fragment thereof); IL-4 (e.g., full length, a variant, or a fragment thereof); TNF alpha (e.g., full length, a variant, or a fragment thereof); IL-12p70 (e.g., full length, a variant, or a fragment thereof); IL-13 (e.g., full length, a variant, or a fragment thereof); IL-8 (e.g., full length, a variant, or a fragment thereof); Eotaxin (e.g., full length, a variant, or a fragment thereof); Eotaxin-3 (e.g., full length, a variant, or a fragment thereof); IL-8 (HA) (e.g., full length, a variant, or a fragment thereof); IP-10 (e.g., full length, a variant, or a fragment thereof); MCP-1 (e.g., full length, a variant, or a fragment thereof); MCP-4 (e.g., full length, a variant, or a fragment thereof); MDC (e.g., full length, a variant, or a fragment thereof); MIP-1a (e.g., full length, a variant, or a fragment thereof); MIP-1b (e.g., full length, a variant, or a fragment thereof); TARC (e.g., full length, a variant, or a fragment thereof); GM-CSF (e.g., full length, a variant, or a fragment thereof); IL-12 23p40 (e.g., full length, a variant, or a fragment thereof); IL-15 (e.g., full length, a variant, or a fragment thereof); IL-16 (e.g., full length, a variant, or a fragment thereof); IL-17a (e.g., full length, a variant, or a fragment thereof); IL-1a (e.g., full length, a variant, or a fragment thereof); IL-5 (e.g., full length, a variant, or a fragment thereof); IL-7 (e.g., full length, a variant, or a fragment thereof); TNF-beta (e.g., full length, a variant, or a fragment thereof); or VEGF (e.g., full length, a variant, or a fragment thereof). In some embodiments, a cytokine profile includes secretion of one or more cytokines or chemokines.

[0474] In an embodiment, a cytokine in a cytokine profile can be modulated, e.g., increased or decreased, by an anti-TCRBV antibody molecule described herein. In one embodiment, the cytokine profile includes cytokines associated with a cytokine storm or cytokine release syndrome (CRS), e.g., IL-6, IL-1beta, TNFalpha and IL-10.

[0475] The term “variant” refers to a polypeptide that has a substantially identical amino acid sequence to the naturally-occurring sequence, or are encoded by a substantially identical nucleotide sequence. In some embodiments, the variant is a functional variant. In some embodiments, a TCRβV variant can bind to TCRα and form a TCR α:β complex.

[0476] The term “functional variant” refers to a polypeptide that has a substantially identical amino acid sequence to the naturally-occurring sequence, or are encoded by a substantially identical nucleotide sequence, and are capable of having one or more activities of the naturally-occurring sequence.

[0477] As used herein, a “multifunctional” or a “multispecific” molecule refers to molecule, e.g., a polypeptide, that has two or more functionalities, e.g., two or more binding specificities. In some embodiments, the functionalities can include one or more immune cell engagers, one or more tumor binding molecules, one or more cytokine molecules, one or more stromal modifiers, and other moieties described herein. In some embodiments, the multispecific molecule is a multispecific antibody molecule, e.g., a bispecific antibody molecule. In some embodiments, the multispecific molecule includes an anti-TCRVb antibody molecule as described herein.

[0478] In some embodiments, the multifunctional molecule includes an immune cell engager. “An immune cell engager” refers to one or more binding specificities that bind and/or activate an immune cell, e.g., a cell involved in an immune response. In embodiments, the immune cell is chosen from a T cell, an NK cell, a B cell, a dendritic cell, and/or the macrophage cell. The immune cell engager can be an antibody molecule, a receptor molecule (e.g., a full length receptor, receptor fragment, or fusion thereof (e.g., a receptor-Fc fusion)), or a ligand molecule (e.g., a full length ligand, ligand fragment, or fusion thereof (e.g., a ligand-Fc fusion)) that binds to the immune cell antigen (e.g., the T cell, the NK cell antigen, the B cell antigen, the dendritic cell antigen, and/or the macrophage cell antigen). In embodiments, the immune cell engager specifically binds to the target immune cell, e.g., binds preferentially to the target immune cell. For example, when the immune cell engager is an antibody molecule, it binds to an immune cell antigen (e.g., a T cell antigen, an NK cell antigen, a B cell antigen, a dendritic cell antigen, and/or a macrophage cell antigen) with a dissociation constant of less than about 10 nM.

[0479] In some embodiments, the multifunctional molecule includes a cytokine molecule. As used herein, a “cytokine molecule” refers to full length, a fragment or a variant of a cytokine; a cytokine further comprising a receptor domain, e.g., a cytokine receptor dimerizing domain; or an agonist of a cytokine receptor, e.g., an antibody molecule (e.g., an agonistic antibody) to a cytokine receptor, that elicits at least one activity of a naturally-occurring cytokine. In some embodiments the cytokine molecule is chosen from interleukin-2 (IL-2), interleukin-7 (IL-7), interleukin-12 (IL-12), interleukin-10 (IL-10), interleukin-15 (IL-15), interleukin-18 (IL-18), interleukin-21 (IL-21), or interferon gamma, or a fragment or variant thereof, or a combination of any of the aforesaid cytokines. The cytokine molecule can be a monomer or a dimer. In embodiments, the cytokine molecule can further include a cytokine receptor dimerizing domain. In other embodiments, the cytokine molecule is an agonist of a cytokine receptor, e.g., an antibody molecule (e.g., an agonistic antibody) to a cytokine receptor chosen from an IL-15Ra or IL-21R.

[0480] As used herein, the term “molecule” as used in, e.g., antibody molecule, cytokine molecule, receptor molecule, includes full-length, naturally-occurring molecules, as well as variants, e.g., functional variants (e.g., truncations, fragments, mutated (e.g., substantially similar sequences) or derivatized form thereof), so long as at least one function and/or activity of the unmodified (e.g., naturally-occurring) molecule remains.

[0481] In some embodiments, the multifunctional molecule includes a stromal modifying moiety. A “stromal modifying moiety,” as used herein refers to an agent, e.g., a protein (e.g., an enzyme), that is capable of altering, e.g., degrading a component of, the stroma. In embodiments, the component of the stroma is chosen from, e.g., an ECM component, e.g., a glycosaminoglycan, e.g., hyaluronan (also known as hyaluronic acid or HA), chondroitin sulfate, chondroitin, dermatan sulfate, heparin sulfate, heparin, entactin, tenascin, aggrecan and keratin sulfate; or an extracellular protein, e.g., collagen, laminin, elastin, fibrinogen, fibronectin, and vitronectin.

[0482] Certain terms are defined below.

[0483] As used herein, the articles “a” and “an” refer to one or more than one, e.g., to at least one, of the grammatical object of the article. The use of the words “a” or “an” when used in conjunction with the term “comprising” herein may mean “one,” but it is also consistent with the meaning of “one or more,” “at least one,” and “one or more than one.”

[0484] As used herein, “about” and “approximately” generally mean an acceptable degree of error for the quantity measured given the nature or precision of the measurements. Exemplary degrees of error are within 20 percent (%), typically, within 10%, and more typically, within 5% of a given range of values.

[0485] “Antibody molecule” as used herein refers to a protein, e.g., an immunoglobulin chain or fragment thereof, comprising at least one immunoglobulin variable domain structure and/or sequence. An antibody molecule encompasses antibodies (e.g., full-length antibodies) and antibody fragments. In an embodiment, an antibody molecule comprises an antigen binding or functional fragment of a full length antibody, or a full length immunoglobulin chain. For example, a full-length antibody is an immunoglobulin (Ig) molecule (e.g., an IgG antibody) that is naturally occurring or formed by normal immunoglobulin gene fragment recombinatorial processes). In embodiments, an antibody molecule refers to an immunologically active, antigen-binding portion of an immunoglobulin molecule, such as an antibody fragment. An antibody fragment, e.g., functional fragment, is a portion of an antibody, e.g., Fab, Fab′, F(ab′)2, F(ab)₂, variable fragment (Fv), domain antibody (dAb), or single chain variable fragment (scFv). A functional antibody fragment binds to the same antigen as that recognized by the intact (e.g., full-length) antibody. The terms “antibody fragment” or “functional fragment” also include isolated fragments consisting of the variable regions, such as the “Fv” fragments consisting of the variable regions of the heavy and light chains or recombinant single chain polypeptide molecules in which light and heavy variable regions are connected by a peptide linker (“scFv proteins”). In some embodiments, an antibody fragment does not include portions of antibodies without antigen binding activity, such as Fc fragments or single amino acid residues. Exemplary antibody molecules include full length antibodies and antibody fragments, e.g., dAb (domain antibody), single chain, Fab, Fab′, and F(ab′)2 fragments, and single chain variable fragments (scFvs). In some embodiments, the antibody molecule is an antibody mimetic. In some embodiments, the antibody molecule is, or comprises, an antibody-like framework or scaffold, such as, fibronectins, ankyrin repeats (e.g., designed ankyrin repeat proteins (DARPins)), avimers, affibody affinity ligands, anticalins, or affilin molecules.

[0486] As used herein, an “immunoglobulin variable domain sequence” refers to an amino acid sequence which can form the structure of an immunoglobulin variable domain. For example, the sequence may include all or part of the amino acid sequence of a naturally-occurring variable domain. For example, the sequence may or may not include one, two, or more N- or C-terminal amino acids, or may include other alterations that are compatible with formation of the protein structure.

[0487] In embodiments, an antibody molecule is monospecific, e.g., it comprises binding specificity for a single epitope. In some embodiments, an antibody molecule is multispecific, e.g., it comprises a plurality of immunoglobulin variable domain sequences, where a first immunoglobulin variable domain sequence has binding specificity for a first epitope and a second immunoglobulin variable domain sequence has binding specificity for a second epitope. In some embodiments, an antibody molecule is a bispecific antibody molecule. “Bispecific antibody molecule” as used herein refers to an antibody molecule that has specificity for more than one (e.g., two, three, four, or more) epitope and/or antigen.

[0488] “Antigen” (Ag) as used herein refers to a molecule that can provoke an immune response, e.g., involving activation of certain immune cells and/or antibody generation. Any macromolecule, including almost all proteins or peptides, can be an antigen. Antigens can also be derived from genomic recombinant or DNA. For example, any DNA comprising a nucleotide sequence or a partial nucleotide sequence that encodes a protein capable of eliciting an immune response encodes an “antigen.” In embodiments, an antigen does not need to be encoded solely by a full length nucleotide sequence of a gene, nor does an antigen need to be encoded by a gene at all. In embodiments, an antigen can be synthesized or can be derived from a biological sample, e.g., a tissue sample, a tumor sample, a cell, or a fluid with other biological components. As used, herein a “tumor antigen” or interchangeably, a “cancer antigen” includes any molecule present on, or associated with, a cancer, e.g., a cancer cell or a tumor microenvironment that can provoke an immune response. As used, herein an “immune cell antigen” includes any molecule present on, or associated with, an immune cell that can provoke an immune response.

[0489] The “antigen-binding site,” or “binding portion” of an antibody molecule refers to the part of an antibody molecule, e.g., an immunoglobulin (Ig) molecule, that participates in antigen binding. In embodiments, the antigen binding site is formed by amino acid residues of the variable (V) regions of the heavy (H) and light (L) chains. Three highly divergent stretches within the variable regions of the heavy and light chains, referred to as hypervariable regions, are disposed between more conserved flanking stretches called “framework regions,” (FRs). FRs are amino acid sequences that are naturally found between, and adjacent to, hypervariable regions in immunoglobulins. In embodiments, in an antibody molecule, the three hypervariable regions of a light chain and the three hypervariable regions of a heavy chain are disposed relative to each other in three dimensional space to form an antigen-binding surface, which is complementary to the three-dimensional surface of a bound antigen. The three hypervariable regions of each of the heavy and light chains are referred to as “complementarity-determining regions,” or “CDRs.” The framework region and CDRs have been defined and described, e.g., in Kabat, E. A., et al. (1991) Sequences of Proteins of Immunological Interest, Fifth Edition, U.S. Department of Health and Human Services, NIH Publication No. 91-3242, and Chothia, C. et al. (1987) J. Mol. Biol. 196:901-917. Each variable chain (e.g., variable heavy chain and variable light chain) is typically made up of three CDRs and four FRs, arranged from amino-terminus to carboxy-terminus in the amino acid order: FR1, CDR1, FR2, CDR2, FR3, CDR3, and FR4.

[0490] “Cancer” as used herein can encompass all types of oncogenic processes and/or cancerous growths. In embodiments, cancer includes primary tumors as well as metastatic tissues or malignantly transformed cells, tissues, or organs. In embodiments, cancer encompasses all histopathologies and stages, e.g., stages of invasiveness/severity, of a cancer. In embodiments, cancer includes relapsed and/or resistant cancer. The terms “cancer” and “tumor” can be used interchangeably. For example, both terms encompass solid and liquid tumors. As used herein, the term “cancer” or “tumor” includes premalignant, as well as malignant cancers and tumors.

[0491] As used herein, an “immune cell” refers to any of various cells that function in the immune system, e.g., to protect against agents of infection and foreign matter. In embodiments, this term includes leukocytes, e.g., neutrophils, eosinophils, basophils, lymphocytes, and monocytes. Innate leukocytes include phagocytes (e.g., macrophages, neutrophils, and dendritic cells), mast cells, eosinophils, basophils, and natural killer cells. Innate leukocytes identify and eliminate pathogens, either by attacking larger pathogens through contact or by engulfing and then killing microorganisms, and are mediators in the activation of an adaptive immune response. The cells of the adaptive immune system are special types of leukocytes, called lymphocytes. B cells and T cells are important types of lymphocytes and are derived from hematopoietic stem cells in the bone marrow. B cells are involved in the humoral immune response, whereas T cells are involved in cell-mediated immune response. The term “immune cell” includes immune effector cells.

[0492] “Immune effector cell,” as that term is used herein, refers to a cell that is involved in an immune response, e.g., in the promotion of an immune effector response. Examples of immune effector cells include, but are not limited to, T cells, e.g., alpha/beta T cells and gamma/delta T cells, B cells, natural killer (NK) cells, natural killer T (NK T) cells, and mast cells.

[0493] The term “effector function” or “effector response” refers to a specialized function of a cell. Effector function of a T cell, for example, may be cytolytic activity or helper activity including the secretion of cytokines.

[0494] The compositions and methods of the present invention encompass polypeptides and nucleic acids having the sequences specified, or sequences substantially identical or similar thereto, e.g., sequences at least 80%, 85%, 90%, 95% identical or higher to the sequence specified. In the context of an amino acid sequence, the term “substantially identical” is used herein to refer to a first amino acid that contains a sufficient or minimum number of amino acid residues that are i) identical to, or ii) conservative substitutions of aligned amino acid residues in a second amino acid sequence such that the first and second amino acid sequences can have a common structural domain and/or common functional activity. For example, amino acid sequences that contain a common structural domain having at least about 80%, 85%, 90%. 91%, 92%, 93%, 94%, 95%, 96%, 97%, 98% or 99% identity to a reference sequence, e.g., a sequence provided herein.

[0495] In the context of nucleotide sequence, the term “substantially identical” is used herein to refer to a first nucleic acid sequence that contains a sufficient or minimum number of nucleotides that are identical to aligned nucleotides in a second nucleic acid sequence such that the first and second nucleotide sequences encode a polypeptide having common functional activity, or encode a common structural polypeptide domain or a common functional polypeptide activity. For example, nucleotide sequences having at least about 80%, 85%, 90%, 91%, 92%, 93%, 94%, 95%, 96%, 97%, 98% or 99% identity to a reference sequence, e.g., a sequence provided herein.

[0496] The term “variant” refers to a polypeptide that has a substantially identical amino acid sequence to a reference amino acid sequence, or is encoded by a substantially identical nucleotide sequence. In some embodiments, the variant is a functional variant.

[0497] The term “functional variant” refers to a polypeptide that has a substantially identical amino acid sequence to a reference amino acid sequence, or is encoded by a substantially identical nucleotide sequence, and is capable of having one or more activities of the reference amino acid sequence.

[0498] Calculations of homology or sequence identity between sequences (the terms are used interchangeably herein) are performed as follows.

[0499] To determine the percent identity of two amino acid sequences, or of two nucleic acid sequences, the sequences are aligned for optimal comparison purposes (e.g., gaps can be introduced in one or both of a first and a second amino acid or nucleic acid sequence for optimal alignment and non-homologous sequences can be disregarded for comparison purposes). In a preferred embodiment, the length of a reference sequence aligned for comparison purposes is at least 30%, preferably at least 40%, more preferably at least 50%, 60%, and even more preferably at least 70%, 80%, 90%, 100% of the length of the reference sequence. The amino acid residues or nucleotides at corresponding amino acid positions or nucleotide positions are then compared. When a position in the first sequence is occupied by the same amino acid residue or nucleotide as the corresponding position in the second sequence, then the molecules are identical at that position (as used herein amino acid or nucleic acid “identity” is equivalent to amino acid or nucleic acid “homology”).

[0500] The percent identity between the two sequences is a function of the number of identical positions shared by the sequences, taking into account the number of gaps, and the length of each gap, which need to be introduced for optimal alignment of the two sequences.

[0501] The comparison of sequences and determination of percent identity between two sequences can be accomplished using a mathematical algorithm. In a preferred embodiment, the percent identity between two amino acid sequences is determined using the Needleman and Wunsch ((1970)J Mol. Biol. 48:444-453) algorithm which has been incorporated into the GAP program in the GCG software package (available at http://www.gcg.com), using either a Blossum 62 matrix or a PAM250 matrix, and a gap weight of 16, 14, 12, 10, 8, 6, or 4 and a length weight of 1, 2, 3, 4, 5, or 6. In yet another preferred embodiment, the percent identity between two nucleotide sequences is determined using the GAP program in the GCG software package (available at http://www.gcg.com), using a NWSgapdna.CMP matrix and a gap weight of 40, 50, 60, 70, or 80 and a length weight of 1, 2, 3, 4, 5, or 6. A particularly preferred set of parameters (and the one that should be used unless otherwise specified) are a Blossum 62 scoring matrix with a gap penalty of 12, a gap extend penalty of 4, and a frameshift gap penalty of 5.

[0502] The percent identity between two amino acid or nucleotide sequences can be determined using the algorithm of E. Meyers and W. Miller ((1989) CABIOS, 4:11-17) which has been incorporated into the ALIGN program (version 2.0), using a PAM120 weight residue table, a gap length penalty of 12 and a gap penalty of 4.

[0503] The nucleic acid and protein sequences described herein can be used as a “query sequence” to perform a search against public databases to, for example, identify other family members or related sequences. Such searches can be performed using the NBLAST and)(BLAST programs (version 2.0) of Altschul, et al. (1990)J Mol. Biol. 215:403-10. BLAST nucleotide searches can be performed with the NBLAST program, score=100, wordlength=12 to obtain nucleotide sequences homologous to a nucleic acid molecule of the invention. BLAST protein searches can be performed with the)(BLAST program, score=50, wordlength=3 to obtain amino acid sequences homologous to protein molecules of the invention. To obtain gapped alignments for comparison purposes, Gapped BLAST can be utilized as described in Altschul et al., (1997) Nucleic Acids Res. 25:3389-3402. When utilizing BLAST and Gapped BLAST programs, the default parameters of the respective programs (e.g., XBLAST and NBLAST) can be used.

[0504] It is understood that the molecules of the present invention may have additional conservative or non-essential amino acid substitutions, which do not have a substantial effect on their functions.

[0505] The term “amino acid” is intended to embrace all molecules, whether natural or synthetic, which include both an amino functionality and an acid functionality and capable of being included in a polymer of naturally-occurring amino acids. Exemplary amino acids include naturally-occurring amino acids; analogs, derivatives and congeners thereof; amino acid analogs having variant side chains; and all stereoisomers of any of any of the foregoing. As used herein the term “amino acid” includes both the D- or L-optical isomers and peptidomimetics.

[0506] A “conservative amino acid substitution” is one in which the amino acid residue is replaced with an amino acid residue having a similar side chain. Families of amino acid residues having similar side chains have been defined in the art. These families include amino acids with basic side chains (e.g., lysine, arginine, histidine), acidic side chains (e.g., aspartic acid, glutamic acid), uncharged polar side chains (e.g., glycine, asparagine, glutamine, serine, threonine, tyrosine, cysteine), nonpolar side chains (e.g., alanine, valine, leucine, isoleucine, proline, phenylalanine, methionine, tryptophan), beta-branched side chains (e.g., threonine, valine, isoleucine) and aromatic side chains (e.g., tyrosine, phenylalanine, tryptophan, histidine).

[0507] The terms “polypeptide”, “peptide” and “protein” (if single chain) are used interchangeably herein to refer to polymers of amino acids of any length. The polymer may be linear or branched, it may comprise modified amino acids, and it may be interrupted by non-amino acids. The terms also encompass an amino acid polymer that has been modified; for example, disulfide bond formation, glycosylation, lipidation, acetylation, phosphorylation, or any other manipulation, such as conjugation with a labeling component. The polypeptide can be isolated from natural sources, can be a produced by recombinant techniques from a eukaryotic or prokaryotic host, or can be a product of synthetic procedures.

[0508] The terms “nucleic acid,” “nucleic acid sequence,” “nucleotide sequence,” or “polynucleotide sequence,” and “polynucleotide” are used interchangeably. They refer to a polymeric form of nucleotides of any length, either deoxyribonucleotides or ribonucleotides, or analogs thereof. The polynucleotide may be either single-stranded or double-stranded, and if single-stranded may be the coding strand or non-coding (antisense) strand. A polynucleotide may comprise modified nucleotides, such as methylated nucleotides and nucleotide analogs. The sequence of nucleotides may be interrupted by non-nucleotide components. A polynucleotide may be further modified after polymerization, such as by conjugation with a labeling component. The nucleic acid may be a recombinant polynucleotide, or a polynucleotide of genomic, cDNA, semisynthetic, or synthetic origin which either does not occur in nature or is linked to another polynucleotide in a non-natural arrangement.

[0509] The term “isolated,” as used herein, refers to material that is removed from its original or native environment (e.g., the natural environment if it is naturally occurring). For example, a naturally-occurring polynucleotide or polypeptide present in a living animal is not isolated, but the same polynucleotide or polypeptide, separated by human intervention from some or all of the co-existing materials in the natural system, is isolated. Such polynucleotides could be part of a vector and/or such polynucleotides or polypeptides could be part of a composition, and still be isolated in that such vector or composition is not part of the environment in which it is found in nature.

[0510] Various aspects of the invention are described in further detail below. Additional definitions are set out throughout the specification.

### Human T Cell Receptor (TCR) Complex

[0511] T cell receptors (TCR) can be found on the surface of T cells. TCRs recognize antigens, e.g., peptides, presented on, e.g., bound to, major histocompatibility complex (MHC) molecules on the surface of cells, e.g., antigen-presenting cells. TCRs are heterodimeric molecules and can comprise an alpha chain, a beta chain, a gamma chain or a delta chain. TCRs comprising an alpha chain and a beta chain are also referred to as TCRαβ. The TCR beta chain consists of the following regions (also known as segments): variable (V), diversity (D), joining (J) and constant (C) (see Mayer G. and Nyland J. (2010) Chapter 10: Major Histocompatibility Complex and T-cell Receptors-Role in Immune Responses. In: Microbiology and Immunology on-line, University of South Carolina School of Medicine). The TCR alpha chain consists of V, J and C regions. The rearrangement of the T-cell receptor (TCR) through somatic recombination of V (variable), D (diversity), J (joining), and C (constant) regions is a defining event in the development and maturation of a T cell. TCR gene rearrangement takes place in the thymus.

[0512] TCRs can comprise a receptor complex, known as the TCR complex, which comprises a TCR heterodimer comprising of an alpha chain and a beta chain, and dimeric signaling molecules, e.g., CD3 co-receptors, e.g., CD3δ/ε, and/or CD3γ/ε.

### TCR Beta V (TCRβV)

[0513] Diversity in the immune system enables protection against a huge array of pathogens. Since the germline genome is limited in size, diversity is achieved not only by the process of V(D)J recombination but also by junctional (junctions between V-D and D-J segments) deletion of nucleotides and addition of pseudo-random, non-templated nucleotides. The TCR beta gene undergoes gene arrangement to generate diversity.

[0514] The TCR V beta repertoire varies between individuals and populations because of, e.g., 7 frequently occurring inactivating polymorphisms in functional gene segments and a large insertion/deletion-related polymorphism encompassing 2 V beta gene segments.

[0515] This disclosure provides, inter alia, antibody molecules and fragments thereof, that bind, e.g., specifically bind, to a human TCR beta V chain (TCRβV), e.g., a TCRβV gene family (also referred to as a group), e.g., a TCRβV subfamily (also referred to as a subgroup), e.g., as described herein. TCR beta V families and subfamilies are known in the art, e.g., as described in Yassai et al., (2009) Immunogenetics 61(7)pp:493-502; Wei S. and Concannon P. (1994) Human Immunology 41(3) pp: 201-206. The antibodies described herein can be recombinant antibodies, e.g., recombinant non-murine antibodies, e.g., recombinant human or humanized antibodies.

[0516] The terms TCRBV, TCRVB, TRBV, TCRβV, TCRVβ or TRW are used interchangeably herein and refer to a TCR beta V chain, e.g., as described herein.

[0517] In an aspect, the disclosure provides an anti-TCRβV antibody molecule that binds to human TCRβV, e.g., a TCRβV family, e.g., gene family or a variant thereof. In some embodiments a TCRBV gene family comprises one or more subfamilies, e.g., as described herein, e.g., in FIG. 3, Table 8A or Table 8B. In some embodiments, the TCRβV gene family comprises: a TCRβ V6 subfamily, a TCRβ V10 subfamily, a TCRβ V12 subfamily, a TCRβ V5 subfamily, a TCRβ V7 subfamily, a TCRβ V11 subfamily, a TCRβ V14 subfamily, a TCRβ V16 subfamily, a TCRβ V18 subfamily, a TCRβ V9 subfamily, a TCRβ V13 subfamily, a TCRβ V4 subfamily, a TCRβ V3 subfamily, a TCRβ V2 subfamily, a TCRβ V15 subfamily, a TCRβ V30 subfamily, a TCRβ V19 subfamily, a TCRβ V27 subfamily, a TCRβ V28 subfamily, a TCRβ V24 subfamily, a TCRβ V20 subfamily, TCRβ V25 subfamily, a TCRβ V29 subfamily, a TCRβ V1 subfamily, a TCRβ V17 subfamily, a TCRβ V21 subfamily, a TCRβ V23 subfamily, or a TCRβ V26 subfamily.

[0518] In some embodiments, TCRβ V6 subfamily is also known as TCRβ V13.1. In some embodiments, the TCRβ V6 subfamily comprises: TCRβ V6-4*01, TCRβ V6-4*02, TCRβ V6-9*01, TCRβ V6-8*01, TCRβ V6-5*01, TCRβ V6-6*02, TCRβ V6-6*01, TCRβ V6-2*01, TCRβ V6-3*01 or TCRβ V6-1*01, or a variant thereof. In some embodiments, TCRβ V6 comprises TCRβ V6-4*01, or a variant thereof. In some embodiments, TCRβ V6 comprises TCRβ V6-4*02, or a variant thereof. In some embodiments, TCRβ V6 comprises TCRβ V6-9*01, or a variant thereof. In some embodiments, TCRβ V6 comprises TCRβ V6-8*01, or a variant thereof. In some embodiments, TCRβ V6 comprises TCRβ V6-5*01, or a variant thereof. In some embodiments, TCRβ V6 comprises TCRβ V6-6*02, or a variant thereof. In some embodiments, TCRβ V6 comprises TCRβ V6-6*01, or a variant thereof. In some embodiments, TCRβ V6 comprises TCRβ V6-2*01, or a variant thereof. In some embodiments, TCRβ V6 comprises TCRβ V6-3 *01, or a variant thereof. In some embodiments, TCRβ V6 comprises TCRβ V6-1*01, or a variant thereof.

[0519] In some embodiments, TCRβ V6 comprises TCRβ V6-5*01, or a variant thereof. In some embodiments, TCRβ V6, e.g., TCRβ V6-5*01, is recognized, e.g., bound, by SEQ ID NO: 1 and/or SEQ ID NO: 2. In some embodiments, TCRβ V6, e.g., TCRβ V6-5*01, is recognized, e.g., bound, by SEQ ID NO: 9 and/or SEQ ID NO: 10. In some embodiments, TCRβ V6 is recognized, e.g., bound, by SEQ ID NO: 9 and/or SEQ ID NO: 11.

[0520] In some embodiments, TCRβ V10 subfamily is also known as TCRβ V12. In some embodiments, the TCRβ V10 subfamily comprises: TCRβ V10-1*01, TCRβ V10-1*02, TCRβ V10-3*01 or TCRβ V10-2*01, or a variant thereof.

[0521] In some embodiments, TCRβ V12 subfamily is also known as TCRβ V8.1. In some embodiments, the TCRβ V12 subfamily comprises: TCRβ V12-4*01, TCRβ V12-3*01, or TCRβ V12-5*01, or a variant thereof. In some embodiments, TCRβ V12 is recognized, e.g., bound, by SEQ ID NO: 15 and/or SEQ ID NO: 16. In some embodiments, TCRβ V12 is recognized, e.g., bound, by any one of SEQ ID NOs 23-25, and/or any one of SEQ ID NO: 26-30:

[0522] In some embodiments, the TCRβ V5 subfamily is chosen from: TCRβ V5-5*01, TCRβ V5-6*01, TCRβ V5-4*01, TCRβ V5-8*01, TCRβ V5-1*01, or a variant thereof.

[0523] In some embodiments, the TCRβ V7 subfamily comprises TCRβ V7-7*01, TCRβ V7-6*01, TCRβ V7-8*02, TCRβ V7-4*01, TCRβ V7-2*02, TCRβ V7-2*03, TCRβ V7-2*01, TCRβ V7-3 *01, TCRβ V7-9*03, or TCRβ V7-9*01, or a variant thereof.

[0524] In some embodiments, the TCRβ V11 subfamily comprises: TCRβ V11-1*01, TCRβ V11-2*01 or TCRβ V11-3*01, or a variant thereof.

[0525] In some embodiments, the TCRβ V14 subfamily comprises TCRβ V14*01, or a variant thereof.

[0526] In some embodiments, the TCRβ V16 subfamily comprises TCRβ V16*01, or a variant thereof.

[0527] In some embodiments, the TCRβ V18 subfamily comprises TCRβ V18*01, or a variant thereof.

[0528] In some embodiments, the TCRβ V9 subfamily comprises TCRβ V9*01 or TCRβ V9*02, or a variant thereof.

[0529] In some embodiments, the TCRβ V13 subfamily comprises TCRβ V13*01, or a variant thereof.

[0530] In some embodiments, the TCRβ V4 subfamily comprises TCRβ V4-2*01, TCRβ V4-3*01, or TCRβ V4-1*01, or a variant thereof.

[0531] In some embodiments, the TCRβ V3 subfamily comprises TCRβ V3-1*01, or a variant thereof.

[0532] In some embodiments, the TCRβ V2 subfamily comprises TCRβ V2*01, or a variant thereof.

[0533] In some embodiments, the TCRβ V15 subfamily comprises TCRβ V15*01, or a variant thereof.

[0534] In some embodiments, the TCRβ V30 subfamily comprises TCRβ V30*01, or TCRβ V30*02, or a variant thereof.

[0535] In some embodiments, the TCRβ V19 subfamily comprises TCRβ V19*01, or TCRβ V19*02, or a variant thereof.

[0536] In some embodiments, the TCRβ V27 subfamily comprises TCRβ V27*01, or a variant thereof.

[0537] In some embodiments, the TCRβ V28 subfamily comprises TCRβ V28*01, or a variant thereof.

[0538] In some embodiments, the TCRβ V24 subfamily comprises TCRβ V24-1*01, or a variant thereof.

[0539] In some embodiments, the TCRβ V20 subfamily comprises TCRβ V20-1*01, or TCRβ V20-1*02, or a variant thereof.

[0540] In some embodiments, the TCRβ V25 subfamily comprises TCRβ V25-1*01, or a variant thereof.

[0541] In some embodiments, the TCRβ V29 subfamily comprises TCRβ V29-1*01, or a variant thereof.

TABLE 8A
List of TCRβV subfamilies and subfamily members

| Reference | | |
|---|---|---|
| in FIG. 3 | Subfamily | Subfamily members |
| A | TCRβ V6 | TCRβ V6-4*01, TCRβ V6-4*02, TCRβ V6-9*01, TCRβ V6-8*01, |
| | Also referred to as: | TCRβ V6-5*01, TCRβ V6-6*02, TCRβ V6-6*01, TCRβ V6-2*01, |
| | TCR VB 13.1 | TCRβ V6-3*01 or TCRβ V6-1*01. |
| B | TCRβ V10 | TCRβ V10-1*01, TCRβ V10-1*02, TCRβ V10-3*01 or TCRβ V10- |
| | Also referred to as: | 2*01 |
| | TCRβ V12 | |
| C | TCRβ V12 | TCRβ V12-4*01, TCRβ V12-3*01, or TCRβ V12-5*01 |
| | Also referred to as: | |
| | TCRβ V8.1 | |
| D | TCRβ V5 | TCRβ V5-5*01, TCRβ V5-6*01, TCRβ V5-4*01, TCRβ V5-8*01, |
| | | TCRβ V5-1*01 |
| E | TCRβ V7 | TCRβ V7-7*01, TCRβ V7-6*01, TCRβ V7 -8*02, TCRβ V7 -4*01, |
| | | TCRβ V7-2*02, TCRβ V7-2*03, TCRβ V7-2*01, TCRβ V7-3*01, |
| | | TCRβ V7-9*03, or TCRβ V7-9*01 |
| F | TCRβ V11 | TCRβ V11-1*01, TCRβ V11-2*01 or TCRβ V11-3*01 |
| G | TCRβ V14 | TCRβ V14*01 |
| H | TCRβ V16 | TCRβ V16*01 |
| I | TCRβ V18 | TCRβ V18*01 |
| J | TCRβ V9 | TCRβ V9*01 or TCRβ V9*02 |
| K | TCRβ V13 | TCRβ V13*01 |
| L | TCRβ V4 | TCRβ V4-2*01, TCRβ V4-3*01, or TCRβ V4-1*01 |
| M | TCRβ V3 | TCRβ V3-1*01 |
| N | TCRβ V2 | TCRβ V2*01 |
| O | TCRβ V15 | TCRβ V15*01 |
| P | TCRβ V30 | TCRβ V30*01, or TCRβ V30*02 |
| Q | TCRβ V19 | TCRβ V19*01, or TCRβ V19*02 |
| R | TCRβ V27 | TCRβ V27*01. |
| S | TCRβ V28 | TCRβ V28*01. |
| T | TCRβ V24 | TCRβ V24-1*01 |
| U | TCRβ V20 | TCRβ V20-1*01, or TCRβ V20-1*02 |
| V | TCRβ V25 | TCRβ V25-1*01 |
| W | TCRβ V29 | TCRβ V29-1*01 |

TABLE 8B
Additional TCRβV subfamilies
Subfamily
TCRβ V1
TCRβ V17
TCRβ V21
TCRβ V23
TCRβ V26

[0542] The various TCRβV subfamilies and/or subfamily members can be expressed at different levels in individuals, e.g., healthy individuals, as disclosed in Kitaura K. et al (2016), BMC Immunology vol 17: 38, the entire contents of which are hereby incorporated by reference. For example, TCRβ V6-5 is represented in approximately 3-6% healthy donors.

[0543] The representation of various TCRBV subfamilies and/or subfamily members can also be different in cancer cells. For example, TCRβV is present in about 3-6% of tumor infiltrating T cells irrespective of tumor type (see Li B. et al., Nature Genetics, 2016, vol:48(7):725-32 the entire contents of which are hereby incorporated by references). Li et al., also disclose that TCRβ V6-5 is present at a high frequency in tumor cells.

[0544] Exemplary amino acid sequences for TCRβV subfamily members can be found on the ImMunoGeneTics Information System website: www.imgt.org, or in a similar resource.

[0545] The alignment of TCRBV amino acid sequences in Table 9 underscores the diversity of TCR sequences. In particular, the TRBV sequences from different subfamilies are considerably different from each other.

### Anti-TCRβV Antibodies

[0546] Disclosed herein, is the discovery of a novel class of antibodies, i.e. anti-TCRβV antibody molecules disclosed herein, which despite having low sequence similarity (e.g., low sequence identity among the different antibody molecules that recognize different TCRβV subfamilies), recognize a structurally conserved region, e.g., domain, on the TCRβV protein (e.g., as denoted by the circled area in FIG. 24A) and have a similar function (e.g., a similar cytokine profile). Thus, the anti-TCRβV antibody molecules disclosed herein share a structure-function relationship.

[0547] Without wishing to be bound by theory, it is believed that in some embodiments, the anti-TCRβV antibody molecules disclosed herein bind to an outward facing epitope of a TCRβV protein when it is in a complex with a TCRalpha protein, e.g., as described by the circled area in FIG. 24A. In some embodiments, the anti-TCRβV antibody molecules disclosed herein recognize (e.g., bind to), a structurally conserved domain on the TCRβV protein (e.g., as denoted by the circled area in FIG. 24A).

[0548] In some embodiments, the anti-TCRβV antibody molecules disclosed herein do not recognize, e.g., bind to, an interface of a TCRβV:TCRalpha complex.

[0549] In some embodiments, the anti-TCRβV antibody molecules disclosed herein do not recognize, e.g., bind to, a constant region of a TCRβV protein. An exemplary antibody that binds to a constant region of a TCRBV region is JOVI. 1 as described in Viney et al., (Hybridoma. 1992 December; 11(6):701-13).

[0550] In some embodiments, the anti-TCRβV antibody molecules disclosed herein do not recognize, e.g., bind to, one or more (e.g., all) of a complementarity determining region (e.g., CDR1, CDR2 and/or CDR3) of a TCRβV protein.

[0551] In some embodiments, the anti-TCRβV antibody molecules disclosed herein binds (e.g., specifically binds) to a TCRβV region. In some embodiments, binding of anti-TCRβV antibody molecules disclosed herein results in a cytokine profile that differs from a cytokine profile of a T cell engager that binds to a receptor or molecule other than a TCRβV region (“a non-TCRβV-binding T cell engager”). In some embodiments, the non-TCRβV-binding T cell engager comprises an antibody that binds to a CD3 molecule (e.g., CD3 epsilon (CD3e) molecule); or a TCR alpha (TCRα) molecule. In some embodiments, the non-TCRβV-binding T cell engager is an OKT3 antibody or an SP34-2 antibody.

[0552] In an aspect, the disclosure provides an anti-TCRβV antibody molecule that binds to human TCRβV, e.g., a TCRβV gene family, e.g., one or more of a TCRβV subfamily, e.g., as described herein, e.g., in FIG. 3, Table 8A, or Table 8B. In some embodiments, the anti-TCRβV antibody molecule binds to one or more TCRβV subfamilies chosen from: a TCRβ V6 subfamily, a TCRβ V10 subfamily, a TCRβ V12 subfamily, a TCRβ V5 subfamily, a TCRβ V7 subfamily, a TCRβ V11 subfamily, a TCRβ V14 subfamily, a TCRβ V16 subfamily, a TCRβ V18 subfamily, a TCRβ V9 subfamily, a TCRβ V13 subfamily, a TCRβ V4 subfamily, a TCRβ V3 subfamily, a TCRβ V2 subfamily, a TCRβ V15 subfamily, a TCRβ V30 subfamily, a TCRβ V19 subfamily, a TCRβ V27 subfamily, a TCRβ V28 subfamily, a TCRβ V24 subfamily, a TCRβ V20 subfamily, TCRβ V25 subfamily, a TCRβ V29 subfamily, a TCRβ V1 subfamily, a TCRβ V17 subfamily, a TCRβ V21 subfamily, a TCRβ V23 subfamily, or a TCRβ V26 subfamily, or a variant thereof.

[0553] In some embodiments, the anti-TCRβV antibody molecule binds to a TCRβ V6 subfamily comprising: TCRβ V6-4*01, TCRβ V6-4*02, TCRβ V6-9*01, TCRβ V6-8*01, TCRβ V6-5*01, TCRβ V6-6*02, TCRβ V6-6*01, TCRβ V6-2*01, TCRβ V6-3*01 or TCRβ V6-1*01, or a variant thereof. In some embodiments the TCRβ V6 subfamily comprises TCRβ V6-5*01, or a variant thereof. In some embodiments, TCRβ V6 comprises TCRβ V6-4*01, or a variant thereof. In some embodiments, TCRβ V6 comprises TCRβ V6-4*02, or a variant thereof. In some embodiments, TCRβ V6 comprises TCRβ V6-9*01, or a variant thereof. In some embodiments, TCRβ V6 comprises TCRβ V6-8*01, or a variant thereof. In some embodiments, TCRβ V6 comprises TCRβ V6-5*01, or a variant thereof. In some embodiments, TCRβ V6 comprises TCRβ V6-6*02, or a variant thereof. In some embodiments, TCRβ V6 comprises TCRβ V6-6*01, or a variant thereof. In some embodiments, TCRβ V6 comprises TCRβ V6-2*01, or a variant thereof. In some embodiments, TCRβ V6 comprises TCRβ V6-3 *01, or a variant thereof. In some embodiments, TCRβ V6 comprises TCRβ V6-1*01, or a variant thereof.

[0554] In some embodiments, the anti-TCRβV antibody molecule binds to a TCRβ V10 subfamily comprising: TCRβ V10-1*01, TCRβ V10-1*02, TCRβ V10-3*01 or TCRβ V10-2*01, or a variant thereof.

[0555] In some embodiments, the anti-TCRβV antibody molecule binds to a TCRβ V12 subfamily comprising: TCRβ V12-4*01, TCRβ V12-3*01 or TCRβ V12-5*01, or a variant thereof.

[0556] In some embodiments, the anti-TCRβV antibody molecule binds to a TCRβ V5 subfamily comprising: TCRβ V5-5*01, TCRβ V5-6*01, TCRβ V5-4*01, TCRβ V5-8*01, TCRβ V5-1*01, or a variant thereof.

[0557] Exemplary anti-TCRβV antibody molecules and the corresponding TCRβV subfamily recognized by said anti-TCRβV antibody molecules is disclosed in Table 10A.

TABLE 10A
Exemplary anti-TCRβV antibody molecules

| TRBV | TRBV | Reagents monoclonal antibodies | | |
|---|---|---|---|---|
| gene name | allele name | Clone name and Specificity | Company product | Isotype |
| TRBV2 | TRBV2*01 | IsMMU 546 (TRBV2) | Serotec V BETA 22 | Mouse |
| | TRBV2*02 | | Coulter Vbeta22 | IgG1 |
| | TRBV2*03 | | | |
| TRBV3-1 | TRBV3-1*01 | FIN9 (TRBV3-1) | Serotec Vbeta9 | Mouse |
| | | AMKB1-2 (TRBV3-1) | Coulter Vbeta9 | IgG2a |
| | TRBV3-1*02 | | BD Biosciences Vbeta9 | Mouse |
| | | | | IgG1 |
| TRBV4-1 | TRBV4-1*01 | ZOE (TRBV4-1, TRBV4-2, | Serotec V BETA 7 | Mouse |
| | | TRBV4-3) | Coulter Vbeta7 | IgG2a |
| | TRBV4-1*02 | 3G5 (TRBV4-1) | Pierce EndogenV beta 7.1 | Mouse |
| | | | | IgG2b |
| TRBV4-2 | TRBV4-2*01 | ZOE (TRBV4-1, TRBV4-2, | Serotec V BETA 7 | Mouse |
| | TRBV4-2*02 | TRBV4-3) | Coulter Vbeta7 | IgG2a |
| TRBV4-3 | TRBV4-3*01 | ZOE (TRBV4-1, TRBV4-2, | Serotec V BETA 7 | Mouse |
| | TRBV4-3*02 | TRBV4-3) | Coulter Vbeta7 | IgG2a |
| | TRBV4-3*03 | | | |
| | TRBV4-3*04 | ZIZOU4 (TRBV4-3) | Coulter Vbeta7.2 | Mouse |
| | | | | IgG2a |
| TRBV5-1 | TRBV5-1*01 | IMMU157 (TRBV5-1) | Serotec Vbeta5.1 | Mouse |
| | | | Coulter Vbeta5.1 | IgG2a |
| | TRBV5-1*02 | LC4 (TRBV5-1) | Pierce Endogen V beta 5(c) | Mouse |
| | | | BD Biosciences | IgGl |
| | | | Vbeta5(c) | |
| TRBV5-4 | TRBV5-4*01 | | | |
| | TRBV5-4*02 | | | |
| | TRBV5-4*03 | | | |
| | TRBV5-4*04 | | | |
| TRBV5-5 | TRBV5-5*01 | 3D11 (TRBV5-5) | Serotec VBETA5.3 | Mouse |
| | | 1C1 (TRBV5-5, TRBV5-6) | Coulter Vbeta5.3 | IgG1 |
| | TRBV5-5*02 | W112 (TRBV5-5) | Pierce Endogen V beta 5(a) | Mouse |
| | | MH3-2 (TRBV5-5, TRBV5-6) | BD Biosciences | IgG1 |
| | | | Vbeta5(a) | |
| | TRBV5-5*03 | | Pierce Endogen V beta 5(b) | Mouse |
| | | | Serotec V beta 5.2/5.3 | IgG1 |
| | | | BD Biosciences | |
| | | | Vbeta5(b) | |
| | | | BD Biosciences Vbeta5 | Mouse |
| | | | | IgG2a |
| | | 4H11 (TM27) as disclosed in | | |
| | | U.S. Pat. No. 5,861,155 | | |
| TRBV5-6 | TRBV5-6*01 | 36213 (TRBV5-6) | Serotec Vbeta 5.2 | Mouse |
| | | 1C1 (TRBV5-5, TRBV5-6) | BD Bioscience | IgG1 |
| | | MH3-2 (TRBV5-5, TRBV5-6) | Vbeta5(a) | Mouse |
| | | | BD Biosciences Vbeta5 | IgG1 |
| | | | | Mouse |
| | | | | IgG2a |
| TRBV5-8 | TRBV5-8*01 | | | |
| | TRBV5-8*02 | | | |
| TRBV6-1 | TRBV6-1*01 | BAM13 (TRBV6-1, TRBV6-5) | Pierce Endogen V beta 13 | Mouse |
| | | | BD Biosciences | IgG1 |
| | | | Vbeta13.1, 13.3 | |
| TRBV6-2 | TRBV6-2*01 | H132 | Coulter Vbeta13.2 | Mouse |
| | | | | IgG1 |
| TRBV6-3 | TRBV6-3*01 | | | |
| TRBV6-4 | TRBV6-4*01 | | | |
| | TRBV6-4*02 | | | |
| TRBV6-5 | TRBV6-5*01 | IMMU 222 (TRBV6-5, | Serotec V BETA 13.1 | Mouse |
| | | TRBV6-6 and TRBV6-9) | Coulter Vbeta13.1 | IgG2b |
| | | BAM13 (TRBV6-1, TRBV6-5) | Pierce Endogen V beta 13 | Mouse |
| | | | BD Biosciences | IgG1 |
| | | | Vbeta 13.1, 13.3 | |
| TRBV6-6 | TRBV6-6*01 | JU-74 (TRBV6-6) | Serotec Vbeta 13.6 | Mouse |
| | TRBV6-6*02 | JU74.3 (TRBV6-6) | Coulter Vbeta 13.6 | IgG1 |
| | TRBV6-6*03 | | | |
| | TRBV6-6*04 | IMMU 222 (TRBV6-5, | Serotec V BETA 13.1 | Mouse |
| | TRBV6-6*05 | TRBV6-6 and TRBV6-9) | Coulter Vbeta13.1 | IgG2b |
| TRBV6-8 | TRBV6-8*01 | | | |
| TRBV6-9 | TRBV6-9*01 | IMMU 222 (TRBV6-5, | Serotec VBETA 13.1 | Mouse |
| | | TRBV6-6 and TRBV6-9) | Coulter Vbeta 13.1 | IgG2b |
| TRBV7-2 | TRBV7-2*01 | OT145 (TRBV7-2) | Pierce Endogen V beta 6.7 | Mouse |
| | TRBV7-2*02 | | BD Biosciences Vbeta6.7 | IgG1 |
| | TRBV7-2*03 | | | |
| | TRBV7-2*04 | | | |
| TRBV7-3 | TRBV7-3*01 | | | |
| | TRBV7-3*04 | | | |
| | TRBV7-3*05 | | | |
| TRBV7-4 | TRBV7-4*01 | | | |
| TRBV7-6 | TRBV7-6*01 | | | |
| | TRBV7-6*02 | | | |
| TRBV7-7 | TRBV7-7*01 | | | |
| | TRBV7-7*02 | | | |
| TRBV7-8 | TRBV7-8*01 | | | |
| | TRBV7-8*02 | | | |
| | TRBV7-8*03 | | | |
| TRBV7-9 | TRBV7-9*01 | | | |
| | TRBV7-9*02 | | | |
| | TRBV7-9*03 | | | |
| | TRVB7-9*04 | | | |
| | TRBV7-9*05 | | | |
| | TRBV7-9*06 | | | |
| | TRBV7-9*07 | | | |
| TRBV9 | TRBV9*01 | BL37.2 (TRBV9) | Serotec Vbeta1 | Rat |
| | TRBV9*02 | | Coulter Vbeta1 | IgG1 |
| | TRBV9*03 | | | |
| TRBV10-1 | TRBV10-1*01 | S511 (TRBV10-1, TRBV10-2, | Pierce Endogen V beta 12 | Mouse |
| | TRBV10-1*02 | TRBV10-3) | BD Biosciences Vbeta12 | IgG2b |
| TRBV10-2 | TRBV10-2*01 | | | |
| | TRBV10-2*02 | | | |
| TRBV10-3 | TRBV10-3*01 | VER2.32.1 (TRBV10-3) | Serotec Vbeta12 | Mouse |
| | TRBV10-3*02 | S511 (TRBV10-1, TRBV10-2, | Coulter Vbeta12 | IgG2a |
| | TRBV10-3*03 | TRBV10-3) | Pierce Endogen V beta 12 | Mouse |
| | TRBV10-3*04 | | BD Biosciences Vbeta12 | IgG2b |
| TRBV11-1 | TRBV11-1*01 | | | |
| TRBV11-2 | TRBV11-2*01 | IG125 (TRBV 11-2) | Serotec Vbeta21.3 | Mouse |
| | TRBV11-2*02 | | Coulter Vbeta21.3 | IgG2a |
| | TRBV11-2*03 | | | |
| TRBV11-3 | TRBV11-3*01 | | | |
| | TRBV11-3*02 | | | |
| | TRBV11-3*03 | | | |
| | TRBV11-3*04 | | | |
| TRBV12-3 | TRBV12-3*01 | 56C5 (TRBV12-3, TRBV12-4) | Serotec Vbeta8.1/8.2 | Mouse |
| | | 56C5.2 (TRBV 12-3, TRBV 12-4) | Coulter Vbeta8 | IgG2a |
| TRBV12-4 | TRBV12-4*01 | 16G8 (TRBV12-3, TRBV12-4) | Pierce Endogen V beta 8(a) | Mouse |
| | | MX-6 (TRBV12-3, TRBV12-4) | BD Biosciences Vbeta8 | IgG2b |
| | TRBV12-4*02 | JR2 (TRBV 12-3, TRBV 12-4, | Pierce Endogen V beta 8(b) | Mouse |
| | | TRBV12-5) | | IgG2a |
| | | | BD Biosciences Vbeta8 | Mouse |
| | | | | IgG2b |
| TRBV12-5 | TRBV12-5*01 | JR2 (TRBV 12-3, TRBV 12-4, | BD Biosciences Vbeta8 | Mouse |
| | | TRBV12-5) | | IgG2b |
| TRBV13 | TRBV13*01 | AF-23 (TRBV13) | Serotec Vbeta23 | Mouse |
| | TRBV13*02 | AF23 (TRBV13) | Coulter Vbeta23 | |
| | | AHUT7 (Vbeta23) | BD Biosciences Vbeta23 | IgG1 |
| TRBV14 | TRBV14*01 | TAMAYA1.2 (TRBV14) | Serotec Vbeta16 | Mouse |
| | TRBV14*02 | | Coulter Vbeta16 | IgG1 |
| TRBV15 | TRBV15*01 | | | |
| | TRBV15*02 | | | |
| | TRBV15*03 | | | |
| TRBV16 | TRBV16*01 | | | |
| | TRBV16*03 | | | |
| TRBV18 | TRBV18*01 | BA62 (TRBV 18) | Serotec V BETA 18 | Mouse |
| | | BA62.6 (TRBV 18) | Coulter Vbeta18 | IgG1 |
| TRBV19 | TRBV19*01 | C1 (TRBV 19) | Pierce Endogen V beta 17 | Mouse |
| | | E17.5F3 (TRBV19) | BD Biosciences Vbeta17 | IgG1 |
| | TRBV19*02 | E17.5F3.15.13 (TRBV19) | Serotec Vbeta17 | Mouse |
| | TRBV19*03 | | Coulter Vbeta17 | IgG1 |
| TRBV20-1 | TRBV20-1*01 | MPB2D5 (TRBV20-1) | Serotec VBETA2 | Mouse |
| | TRBV20-1*02 | | Coulter Vbeta2 | IgG1 |
| | TRBV20-1*03 | | | |
| | TRBV20-1*04 | | | |
| | TRBV20-1*05 | | | |
| | TRBV20-1*06 | | | |
| | TRBV20-1*07 | | | |
| TRBV24-1 | TRBV24-1*01 | | | |
| TRBV25-1 | TRBV25-1*01 | C21 (TRBV25-1) | Serotec V BETA 11 | Mouse |
| | | | Coulter Vbeta11 | IgG2a |
| TRBV27 | TRBV27*01 | CAS1.1.3 (TRBV27) | Serotec Vbeta14 | Mouse |
| | | | Coulter Vbeta14 | IgG1 |
| TRBV28 | TRBV28*01 | CH92 (TRBV28) | Serotec Vbeta3 | Mouse |
| | | 8F10 (TRBV28) | Coulter Vbeta3 | IgM |
| | | JOVI-3 (TRBV28) | Pierce Endogen V beta 3.1 | Mouse |
| | | | | IgG1 |
| | | | BD Biosciences Vbeta3 | Mouse |
| | | | | IgG2a |
| TRBV29-1 | TRBV29-1*01 | WJF24 | Coulter Vbeta4 | Rat |
| | TRBV29-1*02 | | | IgM |
| | TRBV29-1*03 | | | |
| TRBV30 | TRBV30*01 | ELL1.4 (TRBV30) | Serotec Vbeta20 | Mouse |
| | TRBV30*02 | | Coulter Vbeta20 | IgG1 |
| | TRBV30*04 | | | |
| | TRBV30*05 | | | |

[0558] In some embodiments, the anti-TCRβV antibody molecule does not bind to TCRβ V12, or binds to TCRβ V12 with an affinity and/or binding specificity that is less than (e.g., less than about 10%, 20%, 30%, 40%, 50%, 60%, 70%, 80%, 90% or about 2-, 5-, or 10-fold) the affinity and/or binding specificity of the 16G8 murine antibody or a humanized version thereof as described in U.S. Pat. No. 5,861,155.

[0559] In some embodiments, the anti-TCRβV antibody molecule binds to TCRβ V12 with an affinity and/or binding specificity that is greater than (e.g., greater than about 10%, 20%, 30%, 40%, 50%, 60%, 70%, 80%, 90% or about 2-, 5-, or 10-fold) the affinity and/or binding specificity of the 16G8 murine antibody or a humanized version thereof as described in U.S. Pat. No. 5,861,155.

[0560] In some embodiments, the anti-TCRβV antibody molecule binds to a TCRβV region other than TCRβ V12 (e.g., TCRβV region as described herein, e.g., TCRβ V6 subfamily (e.g., TCRβ V6-5*01) with an affinity and/or binding specificity that is greater than (e.g., greater than about 10%, 20%, 30%, 40%, 50%, 60%, 70%, 80%, 90% or about 2-, 5-, or 10-fold) the affinity and/or binding specificity of the 16G8 murine antibody or a humanized version thereof as described in U.S. Pat. No. 5,861,155.

[0561] In some embodiments, the anti-TCRβV antibody molecule does not bind to TCRβ V5-5*01 or TCRβ V5-1*01, or binds to TCRβ V5-5*01 or TCRβ V5-1*01 with an affinity and/or binding specificity that is less than (e.g., less than about 10%, 20%, 30%, 40%, 50%, 60%, 70%, 80%, 90% or about 2-, 5-, or 10-fold) the affinity and/or binding specificity of the TM23 murine antibody or a humanized version thereof as described in U.S. Pat. No. 5,861,155.

[0562] In some embodiments, the anti-TCRβV antibody molecule binds to TCRβ V5-5*01 or TCRβ V5-1*01 with an affinity and/or binding specificity that is greater than (e.g., greater than about 10%, 20%, 30%, 40%, 50%, 60%, 70%, 80%, 90% or about 2-, 5-, or 10-fold) the affinity and/or binding specificity of the TM23 murine antibody or a humanized version thereof as described in U.S. Pat. No. 5,861,155.

[0563] In some embodiments, the anti-TCRβV antibody molecule binds to a TCRβV region other than TCRβ V5-5*01 or TCRβ V5-1*01 (e.g., TCRβV region as described herein, e.g., TCRβ V6 subfamily (e.g., TCRβ V6-5*01) with an affinity and/or binding specificity that is greater than (e.g., greater than about 10%, 20%, 30%, 40%, 50%, 60%, 70%, 80%, 90% or about 2-, 5-, or 10-fold) the affinity and/or binding specificity of the TM23 murine antibody or a humanized version thereof as described in U.S. Pat. No. 5,861,155.

### Anti-TCRβ V6 Antibodies

[0564] Accordingly, in one aspect, the disclosure provides an anti-TCRβV antibody molecule that binds to human TCRβ V6, e.g., a TCRβ V6 subfamily comprising: TCRβ V6-4*01, TCRβ V6-4*02, TCRβ V6-9*01, TCRβ V6-8*01, TCRβ V6-5*01, TCRβ V6-6*02, TCRβ V6-6*01, TCRβ V6-2*01, TCRβ V6-3*01 or TCRβ V6-1*01. In some embodiments the TCRβ V6 subfamily comprises TCRβ V6-5*01 or a variant thereof. In some embodiments, TCRβ V6 comprises TCRβ V6-4*01, or a variant thereof. In some embodiments, TCRβ V6 comprises TCRβ V6-4*02, or a variant thereof. In some embodiments, TCRβ V6 comprises TCRβ V6-9*01, or a variant thereof. In some embodiments, TCRβ V6 comprises TCRβ V6-8*01, or a variant thereof. In some embodiments, TCRβ V6 comprises TCRβ V6-5*01, or a variant thereof. In some embodiments, TCRβ V6 comprises TCRβ V6-6*02, or a variant thereof. In some embodiments, TCRβ V6 comprises TCRβ V6-6*01, or a variant thereof. In some embodiments, TCRβ V6 comprises TCRβ V6-2*01, or a variant thereof. In some embodiments, TCRβ V6 comprises TCRβ V6-3 *01, or a variant thereof. In some embodiments, TCRβ V6 comprises TCRβ V6-1*01, or a variant thereof.

[0565] In some embodiments, TCRβ V6-5*01 is encoded by the nucleic acid sequence of SEQ ID NO: 43, or a sequence having 85%, 90%, 95%, 99% or more identity thereof.

SEQ ID NO: 43
ATGAGCATCGGCCTCCTGTGCTGTGCAGCCTTGTCTCTCCTGTGGGCAG
GTCCAGTGAATGCTGGTGTCACTCAGACCCCAAAATTCCAGGTCCTGAA
GACAGGACAGAGCATGACACTGCAGTGTGCCCAGGATATGAACCATGAA
TACATGTCCTGGTATCGACAAGACCCAGGCATGGGGCTGAGGCTGATTC
ATTACTCAGTTGGTGCTGGTATCACTGACCAAGGAGAAGTCCCCAATGG
CTACAATGTCTCCAGATCAACCACAGAGGATTTCCCGCTCAGGCTGCTG
TCGGCTGCTCCCTCCCAGACATCTGTGTACTTCTGTGCCAGCAGTTACT
C

[0566] In some embodiments, TCRβ V6-5*01 comprises the amino acid sequence of SEQ ID NO: 44, or an amino acid sequence having 85%, 90%, 95%, 99% or more identity thereof.

SEQ ID NO: 44
MSIGLLCCAALSLLWAGPVNAGVTQTPKFQVLKTGQSMTLQCAQDMNHE
YMSWYRQDPGMGLRLIHYSVGAGITDQGEVPNGYNVSRSTTEDFPLRLL
SAAPSQTSVYFCASSY

[0567] In some embodiments, the anti-TCRβV antibody molecule, e.g., anti-TCβ V6 (e.g., anti-TCβ V6-5*01) antibody molecule, is a non-murine antibody molecule, e.g., a human or humanized antibody molecule. In some embodiments, the anti-TCRβV antibody molecule, e.g., anti-TCβ V6 (e.g., anti-TCβ V6-5*01) antibody molecule is a human antibody molecule. In some embodiments, the anti-TCRβV antibody molecule, e.g., anti-TCβ V6 (e.g., anti-TCβ V6-5*01) antibody molecule is a humanized antibody molecule.

[0568] In some embodiments, the anti-TCRβV antibody molecule, e.g., anti-TCβ V6 (e.g., anti-TCβ V6-5*01) antibody molecule, is isolated or recombinant.

[0569] In some embodiments, the anti-TCRβV antibody molecule, e.g., anti-TCβ V6 (e.g., anti-TCβ V6-5*01) antibody molecule, comprises at least one antigen-binding region, e.g., a variable region or an antigen-binding fragment thereof, from an antibody described herein, e.g., an antibody chosen from any one of A-H.1 to A-H.85, e.g., A-H.1, A-H.2 or A-H.68, or an antibody described in Table 1, or encoded by a nucleotide sequence in Table 1, or a sequence substantially identical (e.g., at least 80%, 85%, 90%, 92%, 95%, 97%, 98%, 99% or higher identical) to any of the aforesaid sequences.

[0570] In some embodiments, the anti-TCRβV antibody molecule, e.g., anti-TCβ V6 (e.g., anti-TCβ V6-5*01) antibody molecule, comprises at least one, two, three or four variable regions from an antibody described herein, e.g., an antibody chosen from any one of A-H.1 to A-H.85, e.g., A-H.1, A-H.2 or A-H.68, or an antibody described in Table 1, or encoded by a nucleotide sequence in Table 1, or a sequence substantially identical (e.g., at least 80%, 85%, 90%, 92%, 95%, 97%, 98%, 99% or higher identical) to any of the aforesaid sequences.

[0571] In some embodiments, the anti-TCRβV antibody molecule, e.g., anti-TCβ V6 (e.g., anti-TCβ V6-5*01) antibody molecule, comprises at least one or two heavy chain variable regions from an antibody described herein, e.g., an antibody chosen from any one of A-H.1 to A-H.85, e.g., A-H.1, A-H.2 or A-H.68, or an antibody molecule described in Table 1, or encoded by a nucleotide sequence in Table 1, or a sequence substantially identical (e.g., at least 80%, 85%, 90%, 92%, 95%, 97%, 98%, 99% or higher identical) to any of the aforesaid sequences.

[0572] In some embodiments, the anti-TCRβV antibody molecule comprises a heavy chain variable region (VH) having a consensus sequence of SEQ ID NO: 231 or 3290.

[0573] In some embodiments, the anti-TCRβV antibody molecule, e.g., anti-TCβ V6 (e.g., anti-TCβ V6-5*01) antibody molecule, comprises at least one or two light chain variable regions from an antibody described herein, e.g., an antibody chosen from any one of A-H.1 to A-H.85, e.g., A-H.1, A-H.2 or A-H.68, or an antibody described in Table 1, or encoded by a nucleotide sequence in Table 1, or a sequence substantially identical (e.g., at least 80%, 85%, 90%, 92%, 95%, 97%, 98%, 99% or higher identical) to any of the aforesaid sequences.

[0574] In some embodiments, the anti-TCRβV antibody molecule comprises a light chain variable region (VL) having a consensus sequence of SEQ ID NO: 230 or 3289.

[0575] In some embodiments, the anti-TCRβV antibody molecule, e.g., anti-TCβ V6 (e.g., anti-TCβ V6-5*01) antibody molecule, comprises a heavy chain constant region for an IgG4, e.g., a human IgG4. In still another embodiment, the anti-TCRβV antibody molecule, e.g., anti-TCβ V6 (e.g., anti-TCβ V6-5*01) antibody molecule includes a heavy chain constant region for an IgG1, e.g., a human IgG1. In one embodiment, the heavy chain constant region comprises an amino sequence set forth in Table 3, or a sequence substantially identical (e.g., at least 80%, 85%, 90%, 92%, 95%, 97%, 98%, 99% or higher identical) thereto.

[0576] In some embodiments, the anti-TCRβV antibody molecule, e.g., anti-TCβ V6 (e.g., anti-TCβ V6-5*01) antibody molecule, includes a kappa light chain constant region, e.g., a human kappa light chain constant region. In one embodiment, the light chain constant region comprises an amino sequence set forth in Table 3, or a sequence substantially identical (e.g., at least 80%, 85%, 90%, 92%, 95%, 97%, 98%, 99% or higher identical) thereto.

[0577] In some embodiments, the anti-TCRβV antibody molecule, e.g., anti-TCβ V6 (e.g., anti-TCβ V6-5*01) antibody molecule, includes at least one, two, or three complementarity determining regions (CDRs) from a heavy chain variable region (VH) of an antibody described herein, e.g., an antibody chosen from any one of A-H.1 to A-H.85, e.g., A-H.1, A-H.2 or A-H.68, or an antibody described in Table 1, or encoded by a nucleotide sequence in Table 1, or a sequence substantially identical (e.g., at least 80%, 85%, 90%, 92%, 95%, 97%, 98%, 99% or higher identical) to any of the aforesaid sequences.

[0578] In some embodiments, the anti-TCRβV antibody molecule, e.g., anti-TCRβ V6 (e.g., anti-TCRβ V6-5*01) antibody molecule, includes at least one, two, or three CDRs (or collectively all of the CDRs) from a heavy chain variable region comprising an amino acid sequence shown in Table 1, or encoded by a nucleotide sequence shown in Table 1. In one embodiment, one or more of the CDRs (or collectively all of the CDRs) have one, two, three, four, five, six or more changes, e.g., amino acid substitutions or deletions, relative to the amino acid sequence shown in Table 1, or encoded by a nucleotide sequence shown in Table 1.

[0579] In some embodiments, the anti-TCRβV antibody molecule, e.g., anti-TCRβ V6 (e.g., anti-TCRβ V6-5*01) antibody molecule, includes at least one, two, or three complementarity determining regions (CDRs) from a light chain variable region of an antibody described herein, e.g., an antibody chosen from any one of A-H.1 to A-H.85, e.g., A-H.1, A-H.2 or A-H.68, or an antibody described in Table 1, or encoded by a nucleotide sequence in Table 1, or a sequence substantially identical (e.g., at least 80%, 85%, 90%, 92%, 95%, 97%, 98%, 99% or higher identical) to any of the aforesaid sequences.

[0580] In some embodiments, the anti-TCRβV antibody molecule, e.g., anti-TCRβ V6 (e.g., anti-TCRβ V6-5*01) antibody molecule, includes at least one, two, or three CDRs (or collectively all of the CDRs) from a light chain variable region comprising an amino acid sequence shown in Table 1, or encoded by a nucleotide sequence shown in Table 1. In one embodiment, one or more of the CDRs (or collectively all of the CDRs) have one, two, three, four, five, six or more changes, e.g., amino acid substitutions or deletions, relative to the amino acid sequence shown in Table 1, or encoded by a nucleotide sequence shown in Table 1.

[0581] In some embodiments, the anti-TCRβV antibody molecule, e.g., anti-TCRβ V6 (e.g., anti-TCRβ V6-5*01) antibody molecule, includes at least one, two, three, four, five or six CDRs (or collectively all of the CDRs) from a heavy and light chain variable region comprising an amino acid sequence shown in Table 1, or encoded by a nucleotide sequence shown in Table 1. In one embodiment, one or more of the CDRs (or collectively all of the CDRs) have one, two, three, four, five, six or more changes, e.g., amino acid substitutions or deletions, relative to the amino acid sequence shown in Table 1, or encoded by a nucleotide sequence shown in Table 1.

[0582] In some embodiments, the anti-TCRβV antibody molecule, e.g., anti-TCRβ V6 (e.g., anti-TCRβ V6-5*01) antibody molecule, molecule includes all six CDRs from an antibody described herein, e.g., an antibody chosen from any one of A-H.1 to A-H.85, e.g., A-H.1, A-H.2 or A-H.68, or an antibody described in Table 1, or encoded by a nucleotide sequence in Table 1, or closely related CDRs, e.g., CDRs which are identical or which have at least one amino acid alteration, but not more than two, three or four alterations (e.g., substitutions, deletions, or insertions, e.g., conservative substitutions). In some embodiments, the anti-TCRβV antibody molecule, e.g., anti-TCRβ V6 (e.g., anti-TCRβ V6-5*01) antibody molecule, may include any CDR described herein.

[0583] In some embodiments, the anti-TCRβV antibody molecule, e.g., anti-TCRβ V6 (e.g., anti-TCRβ V6-5*01) antibody molecule includes at least one, two, or three CDRs according to Kabat et al. (e.g., at least one, two, or three CDRs according to the Kabat definition as set out in Table 1) from a heavy chain variable region of an antibody described herein, e.g., an antibody chosen from any one of A-H.1 to A-H.85, e.g., A-H.1, A-H.2 or A-H.68, or an antibody described in Table 1, or a sequence substantially identical (e.g., at least 80%, 85%, 90%, 92%, 95%, 97%, 98%, 99% or higher identical) to any of the aforesaid sequences; or which have at least one amino acid alteration, but not more than two, three or four alterations (e.g., substitutions, deletions, or insertions, e.g., conservative substitutions) relative to one, two, or three CDRs according to Kabat et al. shown in Table 1.

[0584] In some embodiments, the anti-TCRβV antibody molecule, e.g., anti-TCRβ V6 (e.g., anti-TCRβ V6-5*01) antibody molecule includes at least one, two, or three CDRs according to Kabat et al. (e.g., at least one, two, or three CDRs according to the Kabat definition as set out in Table 1) from a light chain variable region of an antibody described herein, e.g., an antibody chosen from any one of A-H.1 to A-H.85, e.g., A-H.1, A-H.2 or A-H.68, or an antibody described in Table 1, or a sequence substantially identical (e.g., at least 80%, 85%, 90%, 92%, 95%, 97%, 98%, 99% or higher identical) to any of the aforesaid sequences; or which have at least one amino acid alteration, but not more than two, three or four alterations (e.g., substitutions, deletions, or insertions, e.g., conservative substitutions) relative to one, two, or three CDRs according to Kabat et al. shown in Table 1.

[0585] In some embodiments, the anti-TCRβV antibody molecule, e.g., anti-TCRβ V6 (e.g., anti-TCRβ V6-5*01) antibody molecule, includes at least one, two, three, four, five, or six CDRs according to Kabat et al. (e.g., at least one, two, three, four, five, or six CDRs according to the Kabat definition as set out in Table 1) from the heavy and light chain variable regions of an antibody described herein, e.g., an antibody chosen from any one of A-H.1 to A-H.85, e.g., A-H.1, A-H.2 or A-H.68, or an antibody described in Table 1, or encoded by a nucleotide sequence in Table 1; or a sequence substantially identical (e.g., at least 80%, 85%, 90%, 92%, 95%, 97%, 98%, 99% or higher identical) to any of the aforesaid sequences; or which have at least one amino acid alteration, but not more than two, three or four alterations (e.g., substitutions, deletions, or insertions, e.g., conservative substitutions) relative to one, two, three, four, five, or six CDRs according to Kabat et al. shown in Table 1.

[0586] In some embodiments, the anti-TCRβV antibody molecule, e.g., anti-TCRβ V6 (e.g., anti-TCRβ V6-5*01) antibody molecule, includes all six CDRs according to Kabat et al. (e.g., all six CDRs according to the Kabat definition as set out in Table 1) from the heavy and light chain variable regions of an antibody described herein, e.g., an antibody chosen from any one of A-H.1 to A-H.85, e.g., A-H.1, A-H.2 or A-H.68, or an antibody described in Table 1, or encoded by a nucleotide sequence in Table 1; or a sequence substantially identical (e.g., at least 80%, 85%, 90%, 92%, 95%, 97%, 98%, 99% or higher identical) to any of the aforesaid sequences; or which have at least one amino acid alteration, but not more than two, three or four alterations (e.g., substitutions, deletions, or insertions, e.g., conservative substitutions) relative to all six CDRs according to Kabat et al. shown in Table 1. In one embodiment, the anti-TCRβV antibody molecule, e.g., anti-TCRβ V6 (e.g., anti-TCRβ V6-5*01) antibody molecule, may include any CDR described herein.

[0587] In some embodiments, the anti-TCRβV antibody molecule, e.g., anti-TCRβ V6 (e.g., anti-TCRβ V6-5*01) antibody molecule, includes at least one, two, or three hypervariable loops that have the same canonical structures as the corresponding hypervariable loop of an antibody described herein, e.g., an antibody chosen from chosen from any one of A-H.1 to A-H.85, e.g., A-H.1, A-H.2 or A-H.68, e.g., the same canonical structures as at least loop 1 and/or loop 2 of the heavy and/or light chain variable domains of an antibody described herein. See, e.g., Chothia et al., (1992) J. Mol. Biol. 227:799-817; Tomlinson et al., (1992) J. Mol. Biol. 227:776-798 for descriptions of hypervariable loop canonical structures. These structures can be determined by inspection of the tables described in these references.

[0588] In some embodiments, the anti-TCRβV antibody molecule, e.g., anti-TCRβ V6 (e.g., anti-TCRβ V6-5*01) antibody molecule includes at least one, two, or three CDRs according to Chothia et al. (e.g., at least one, two, or three CDRs according to the Chothia definition as set out in Table 1) from a heavy chain variable region of an antibody described herein, e.g., an antibody chosen from any one of A-H.1 to A-H.85, e.g., A-H.1, A-H.2 or A-H.68, or as described in Table 1, or a sequence substantially identical (e.g., at least 80%, 85%, 90%, 92%, 95%, 97%, 98%, 99% or higher identical) to any of the aforesaid sequences; or which have at least one amino acid alteration, but not more than two, three or four alterations (e.g., substitutions, deletions, or insertions, e.g., conservative substitutions) relative to one, two, or three CDRs according to Chothia et al. shown in Table 1.

[0589] In some embodiments, the anti-TCRβV antibody molecule, e.g., anti-TCRβ V6 (e.g., anti-TCRβ V6-5*01) antibody molecule includes at least one, two, or three CDRs according to Chothia et al. (e.g., at least one, two, or three CDRs according to the Chothia definition as set out in Table 1) from a light chain variable region of an antibody described herein, e.g., an antibody chosen from any one of A-H.1 to A-H.85, e.g., A-H.1, A-H.2 or A-H.68, or an antibody described in Table 1, or a sequence substantially identical (e.g., at least 80%, 85%, 90%, 92%, 95%, 97%, 98%, 99% or higher identical) to any of the aforesaid sequences; or which have at least one amino acid alteration, but not more than two, three or four alterations (e.g., substitutions, deletions, or insertions, e.g., conservative substitutions) relative to one, two, or three CDRs according to Chothia et al. shown in Table 1.

[0590] In some embodiments, the anti-TCRβV antibody molecule, e.g., anti-TCRβ V6 (e.g., anti-TCRβ V6-5*01) antibody molecule, includes at least one, two, three, four, five, or six CDRs according to Chothia et al. (e.g., at least one, two, three, four, five, or six CDRs according to the Chothia definition as set out in Table 1) from the heavy and light chain variable regions of an antibody described herein, e.g., an antibody chosen from any one of A-H.1 to A-H.85, e.g., A-H.1, A-H.2 or A-H.68, or an antibody described in Table 1, or encoded by the nucleotide sequence in Table 1; or a sequence substantially identical (e.g., at least 80%, 85%, 90%, 92%, 95%, 97%, 98%, 99% or higher identical) to any of the aforesaid sequences; or which have at least one amino acid alteration, but not more than two, three or four alterations (e.g., substitutions, deletions, or insertions, e.g., conservative substitutions) relative to one, two, three, four, five, or six CDRs according to Chothia et al. shown in Table 1.

[0591] In some embodiments, the anti-TCRβV antibody molecule, e.g., anti-TCRβ V6 (e.g., anti-TCRβ V6-5*01) antibody molecule, includes all six CDRs according to Chothia et al. (e.g., all six CDRs according to the Chothia definition as set out in Table 1) from the heavy and light chain variable regions of an antibody described herein, e.g., an antibody chosen from any one of A-H.1 to A-H.85, e.g., A-H.1, A-H.2 or A-H.68, or an antibody described in Table 1, or encoded by a nucleotide sequence in Table 1; or a sequence substantially identical (e.g., at least 80%, 85%, 90%, 92%, 95%, 97%, 98%, 99% or higher identical) to any of the aforesaid sequences; or which have at least one amino acid alteration, but not more than two, three or four alterations (e.g., substitutions, deletions, or insertions, e.g., conservative substitutions) relative to all six CDRs according to Chothia et al. shown in Table 1. In one embodiment, the anti-TCRβV antibody molecule, e.g., anti-TCRβ V6 (e.g., anti-TCRβ V6-5*01) antibody molecule, may include any CDR described herein.

[0592] In some embodiments, the anti-TCRβV antibody molecule, e.g., anti-TCRβ V6 (e.g., anti-TCRβ V6-5*01) antibody molecule, molecule includes a combination of CDRs or hypervariable loops defined according to Kabat et al., Chothia et al., or as described in Table 1.

[0593] In some embodiments, the anti-TCRβV antibody molecule, e.g., anti-TCRβ V6 (e.g., anti-TCRβ V6-5*01) antibody molecule, can contain any combination of CDRs or hypervariable loops according to the Kabat and Chothia definitions.

[0594] In some embodiments, a combined CDR as set out in Table 1 is a CDR that comprises a Kabat CDR and a Chothia CDR.

[0595] In some embodiments, the anti-TCRβV antibody molecule, e.g., anti-TCRβ V6 (e.g., anti-TCRβ V6-5*01) antibody molecule, molecule includes a combination of CDRs or hypervariable loops identified as combined CDRs in Table 1. In some embodiments, the anti-TCRβV antibody molecule, e.g., anti-TCRβ V6 (e.g., anti-TCRβ V6-5*01) antibody molecule, can contain any combination of CDRs or hypervariable loops according the “combined” CDRs are described in Table 1.

[0596] In an embodiment, e.g., an embodiment comprising a variable region, a CDR (e.g., a combined CDR, Chothia CDR or Kabat CDR), or other sequence referred to herein, e.g., in Table 1, the antibody molecule is a monospecific antibody molecule, a bispecific antibody molecule, a bivalent antibody molecule, a biparatopic antibody molecule, or an antibody molecule that comprises an antigen binding fragment of an antibody, e.g., a half antibody or antigen binding fragment of a half antibody. In certain embodiments the antibody molecule comprises a multispecific molecule, e.g., a bispecific molecule, e.g., as described herein.

[0597] In an embodiment, the anti-TCRβV antibody molecule, e.g., anti-TCRβ V6 (e.g., anti-TCRβ V6-5*01) antibody molecule includes:

[0598] (i) one, two or all of a light chain complementarity determining region 1 (LC CDR1), a light chain complementarity determining region 2 (LC CDR2), and a light chain complementarity determining region 3 (LC CDR3) of SEQ ID NO: 2, SEQ ID NO: 10 or SEQ ID NO: 11, and/or

[0599] (ii) one, two or all of a heavy chain complementarity determining region 1 (HC CDR1), heavy chain complementarity determining region 2 (HC CDR2), and a heavy chain complementarity determining region 3 (HC CDR3) of SEQ ID NO: 1 or SEQ ID NO: 9.

[0600] In some embodiments, the anti-TCRβV antibody molecule, e.g., anti-TCRβ V6 (e.g., anti-TCRβ V6-5*01) antibody molecule comprises a LC CDR1, LC CDR2, and LC CDR3 of SEQ ID NO: 2, and a HC CDR1, HC CDR2, and HC CDR3 of SEQ ID NO: 1.

[0601] In some embodiments the anti-TCRβV antibody molecule, e.g., anti-TCRβ V6 (e.g., anti-TCRβ V6-5*01) antibody molecule comprises a LC CDR1, LC CDR2, and LC CDR3 of SEQ ID NO: 10, and a HC CDR1, HC CDR2, and HC CDR3 of SEQ ID NO: 9.

[0602] In some embodiments, the anti-TCRβV antibody molecule, e.g., anti-TCRβ V6 (e.g., anti-TCRβ V6-5*01) antibody molecule comprises a LC CDR1, LC CDR2, and LC CDR3 of SEQ ID NO: 11, and a HC CDR1, HC CDR2, and HC CDR3 of SEQ ID NO: 9.

[0603] In an embodiment, the anti-TCRβV antibody molecule, e.g., anti-TCRβ V6 (e.g., anti-TCRβ V6-5*01) antibody molecule comprises:

[0604] (i) a LC CDR1 amino acid sequence of SEQ ID NO: 6, a LC CDR2 amino acid sequence of SEQ ID NO: 7, or a LC CDR3 amino acid sequence of SEQ ID NO: 8; and/or

[0605] (ii) a HC CDR1 amino acid sequence of SEQ ID NO: 3, a HC CDR2 amino acid sequence of SEQ ID NO: 4, or a HC CDR3 amino acid sequence of SEQ ID NO: 5.

[0606] In some embodiments, the anti-TCRβV antibody molecule, e.g., anti-TCRβ V6 (e.g., anti-TCRβ V6-5*01) antibody molecule comprises:

[0607] (i) a light chain variable region (VL) comprising a LC CDR1 amino acid sequence of SEQ ID NO: 6, a LC CDR2 amino acid sequence of SEQ ID NO: 7, or a LC CDR3 amino acid sequence of SEQ ID NO: 8; and/or

[0608] (ii) a heavy chain variable region (VH) comprising a HC CDR1 amino acid sequence of SEQ ID NO: 3, a HC CDR2 amino acid sequence of SEQ ID NO: 4, or a HC CDR3 amino acid sequence of SEQ ID NO: 5.

[0609] In an embodiment, the anti-TCRβV antibody molecule, e.g., anti-TCRβ V6 (e.g., anti-TCRβ V6-5*01) antibody molecule comprises:

[0610] (i) a LC CDR1 amino acid sequence of SEQ ID NO: 51, a LC CDR2 amino acid sequence of SEQ ID NO: 52, or a LC CDR3 amino acid sequence of SEQ ID NO: 53; and/or

[0611] (ii) a HC CDR1 amino acid sequence of SEQ ID NO: 45, a HC CDR2 amino acid sequence of SEQ ID NO: 46, or a HC CDR3 amino acid sequence of SEQ ID NO: 47.

[0612] In some embodiments, the anti-TCRβV antibody molecule, e.g., anti-TCRβ V6 (e.g., anti-TCRβ V6-5*01) antibody molecule comprises:

[0613] (i) a light chain variable region (VL) comprising a LC CDR1 amino acid sequence of SEQ ID NO: 51, a LC CDR2 amino acid sequence of SEQ ID NO: 52, or a LC CDR3 amino acid sequence of SEQ ID NO: 53; and/or

[0614] (ii) a heavy chain variable region (VH) comprising a HC CDR1 amino acid sequence of SEQ ID NO: 45, a HC CDR2 amino acid sequence of SEQ ID NO: 46, or a HC CDR3 amino acid sequence of SEQ ID NO: 47.

[0615] In an embodiment, the anti-TCRβV antibody molecule, e.g., anti-TCRβ V6 (e.g., anti-TCRβ V6-5*01) antibody molecule comprises:

[0616] (i) a LC CDR1 amino acid sequence of SEQ ID NO: 54, a LC CDR2 amino acid sequence of SEQ ID NO: 55, or a LC CDR3 amino acid sequence of SEQ ID NO: 56; and/or

[0617] (ii) a HC CDR1 amino acid sequence of SEQ ID NO: 48, a HC CDR2 amino acid sequence of SEQ ID NO: 49, or a HC CDR3 amino acid sequence of SEQ ID NO: 50.

[0618] In some embodiments, the anti-TCRβV antibody molecule, e.g., anti-TCRβ V6 (e.g., anti-TCRβ V6-5*01) antibody molecule comprises:

[0619] (i) a light chain variable region (VL) comprising a LC CDR1 amino acid sequence of SEQ ID NO: 54, a LC CDR2 amino acid sequence of SEQ ID NO: 55, or a LC CDR3 amino acid sequence of SEQ ID NO: 56; and/or

[0620] (ii) a heavy chain variable region (VH) comprising a HC CDR1 amino acid sequence of SEQ ID NO: 48, a HC CDR2 amino acid sequence of SEQ ID NO: 49, or a HC CDR3 amino acid sequence of SEQ ID NO: 50.

[0621] In one embodiment, the light or the heavy chain variable framework (e.g., the region encompassing at least FR1, FR2, FR3, and optionally FR4) of the anti-TCRβV antibody molecule, e.g., anti-TCRβ V6 (e.g., anti-TCRβ V6-5*01) antibody molecule can be chosen from: (a) a light or heavy chain variable framework including at least 80%, 85%, 87% 90%, 92%, 93%, 95%, 97%, 98%, or 100% of the amino acid residues from a human light or heavy chain variable framework, e.g., a light or heavy chain variable framework residue from a human mature antibody, a human germline sequence, or a human consensus sequence; (b) a light or heavy chain variable framework including from 20% to 80%, 40% to 60%, 60% to 90%, or 70% to 95% of the amino acid residues from a human light or heavy chain variable framework, e.g., a light or heavy chain variable framework residue from a human mature antibody, a human germline sequence, or a human consensus sequence; (c) a non-human framework (e.g., a rodent framework); or (d) a non-human framework that has been modified, e.g., to remove antigenic or cytotoxic determinants, e.g., deimmunized, or partially humanized. In one embodiment, the light or heavy chain variable framework region (particularly FR1, FR2 and/or FR3) includes a light or heavy chain variable framework sequence at least 70, 75, 80, 85, 87, 88, 90, 92, 94, 95, 96, 97, 98, 99% identical or identical to the frameworks of a VL or VH segment of a human germline gene.

[0622] In some embodiments, the anti-TCRβV antibody molecule, e.g., anti-TCRβ V6 (e.g., anti-TCRβ V6-5*01) antibody molecule, comprises a heavy chain variable domain having at least one, two, three, four, five, six, seven, ten, fifteen, twenty or more changes, e.g., amino acid substitutions or deletions, from an amino acid sequence of any one of A-H.1 to A-H.85, e.g., A-H.1, A-H.2 or A-H.68, e.g., the amino acid sequence of the FR region in the entire variable region, e.g., shown in FIG. 1A, or in SEQ ID NO: 9.

[0623] Alternatively, or in combination with the heavy chain substitutions described herein, the anti-TCRβV antibody molecule, e.g., anti-TCRβ V6 (e.g., anti-TCRβ V6-5*01) antibody molecule, comprises a light chain variable domain having at least one, two, three, four, five, six, seven, ten, fifteen, twenty or more amino acid changes, e.g., amino acid substitutions or deletions, from an amino acid sequence of any one of A-H.1 to A-H.85, e.g., A-H.1, A-H.2 or A-H.68, e.g., the amino acid sequence of the FR region in the entire variable region, e.g., shown in FIG. 1B, or in SEQ ID NO: 10 or SEQ ID NO: 11.

[0624] In some embodiments, the anti-TCRβV antibody molecule, e.g., anti-TCRβ V6 (e.g., anti-TCRβ V6-5*01) antibody molecule, includes one, two, three, or four heavy chain framework regions shown in FIG. 1A, or a sequence substantially identical thereto.

[0625] In some embodiments, the anti-TCRβV antibody molecule, e.g., anti-TCRβ V6 (e.g., anti-TCRβ V6-5*01) antibody molecule, includes one, two, three, or four light chain framework regions shown in FIG. 1B, or a sequence substantially identical thereto.

[0626] In some embodiments, the anti-TCRβV antibody molecule, e.g., anti-TCRβ V6 (e.g., anti-TCRβ V6-5*01) antibody molecule, comprises the light chain framework region 1 of A-H.1 or A-H.2, e.g., as shown in FIG. 1B.

[0627] In some embodiments, the anti-TCRβV antibody molecule, e.g., anti-TCRβ V6 (e.g., anti-TCRβ V6-5*01) antibody molecule, comprises the light chain framework region 2 of A-H.1 or A-H.2, e.g., as shown in FIG. 1B.

[0628] In some embodiments, the anti-TCRβV antibody molecule, e.g., anti-TCRβ V6 (e.g., anti-TCRβ V6-5*01) antibody molecule, comprises the light chain framework region 3 of A-H.1 or A-H.2, e.g., as shown in FIG. 1B.

[0629] In some embodiments, the anti-TCRβV antibody molecule, e.g., anti-TCRβ V6 (e.g., anti-TCRβ V6-5*01) antibody molecule, comprises the light chain framework region 4 of A-H.1 or A-H.2, e.g., as shown in FIG. 1B.

[0630] In some embodiments, the anti-TCRβV antibody molecule, e.g., anti-TCRβ V6 (e.g., anti-TCRβ V6-5*01) antibody molecule, comprises a light chain variable domain comprising a framework region, e.g., framework region 1 (FR1), comprising a change, e.g., a substitution (e.g., a conservative substitution) at position 10 according to Kabat numbering. In some embodiments, the FR1 comprises a Phenylalanine at position 10, e.g., a Serine to Phenyalanine substitution. In some embodiments, the substitution is relative to a human germline light chain framework region sequence.

[0631] In some embodiments, the anti-TCRβV antibody molecule, e.g., anti-TCRβ V6 (e.g., anti-TCRβ V6-5*01) antibody molecule, comprises a light chain variable domain comprising a framework region, e.g., framework region 2 (FR2), comprising a change, e.g., a substitution (e.g., a conservative substitution) at a position disclosed herein according to Kabat numbering. In some embodiments, FR2 comprises a Histidine at position 36, e.g., a substitution at position 36 according to Kabat numbering, e.g., a Tyrosine to Histidine substitution. In some embodiments, FR2 comprises an Alanine at position 46, e.g., a substitution at position 46 according to Kabat numbering, e.g., an Arginine to Alanine substitution. In some embodiments, the substitution is relative to a human germline light chain framework region sequence.

[0632] In some embodiments, the anti-TCRβV antibody molecule, e.g., anti-TCRβ V6 (e.g., anti-TCRβ V6-5*01) antibody molecule, comprises a light chain variable domain comprising a framework region, e.g., framework region 3 (FR3), comprising a change, e.g., a substitution (e.g., a conservative substitution) at a position disclosed herein according to Kabat numbering. In some embodiments, FR3 comprises a Phenyalanine at position 87, e.g., a substitution at position 87 according to Kabat numbering, e.g., a Tyrosine to Phenyalanine substitution. In some embodiments, the substitution is relative to a human germline light chain framework region sequence.

[0633] In some embodiments, the anti-TCRβV antibody molecule, e.g., anti-TCRβ V6 (e.g., anti-TCRβ V6-5*01) antibody molecule, comprises a light chain variable domain comprising: (a) a framework region 1 (FR1) comprising a Phenylalanine at position 10, e.g., a substitution at position 10 according to Kabat numbering, e.g., a Serine to Phenyalanine substitution; (b) a framework region 2 (FR2) comprising a Histidine at position 36, e.g., a substitution at position 36 according to Kabat numbering, e.g., a Tyrosine to Histidine substitution, and a Alanine at position 46, e.g., a substitution at position 46 according to Kabat numbering, e.g., a Arginine to Alanine substitution; and (c) a framework region 3 (FR3) comprising a Phenylalanine at position 87, e.g., a substitution at position 87 according to Kabat numbering, e.g., a Tyrosine to Phenyalanine substitution, e.g., as shown in the amino acid sequence of SEQ ID NO: 10. In some embodiments, the substitution is relative to a human germline light chain framework region sequence.

[0634] In some embodiments, the anti-TCRβV antibody molecule, e.g., anti-TCRβ V6 (e.g., anti-TCRβ V6-5*01) antibody molecule, comprises a light chain variable domain comprising: (a) a framework region 2 (FR2) comprising a Histidine at position 36, e.g., a substitution at position 36 according to Kabat numbering, e.g., a Tyrosine to Histidine substitution, and a Alanine at position 46, e.g., a substitution at position 46 according to Kabat numbering, e.g., a Arginine to Alanine substitution; and (b) a framework region 3 (FR3) comprising a Phenylalanine at position 87, e.g., a substitution at position 87 according to Kabat numbering, e.g., a Tyrosine to Phenyalanine substitution, e.g., as shown in the amino acid sequence of SEQ ID NO: 11. In some embodiments, the substitution is relative to a human germline light chain framework region sequence.

[0635] In some embodiments, the anti-TCRβV antibody molecule, e.g., anti-TCRβ V6 (e.g., anti-TCRβ V6-5*01) antibody molecule, comprises a light chain variable domain comprising: (a) a framework region 1 (FR1) comprising a change, e.g., a substitution (e.g., a conservative substitution) at one or more (e.g., all) positions disclosed herein according to Kabat numbering; (b) a framework region 2 (FR2) comprising a change, e.g., a substitution (e.g., a conservative substitution) at one or more (e.g., all) position disclosed herein according to Kabat numbering and (c) a framework region 3 (FR3) comprising a change, e.g., a substitution (e.g., a conservative substitution) at one or more (e.g., all) position disclosed herein according to Kabat numbering. In some embodiments, the substitution is relative to a human germline light chain framework region sequence.

[0636] In some embodiments, the anti-TCRβV antibody molecule, e.g., anti-TCRβ V6 (e.g., anti-TCRβ V6-5*01) antibody molecule, comprises the heavy chain framework region 1 of A-H.1 or A-H.2, e.g., as shown in FIG. 1A.

[0637] In some embodiments, the anti-TCRβV antibody molecule, e.g., anti-TCRβ V6 (e.g., anti-TCRβ V6-5*01) antibody molecule, comprises the heavy chain framework region 2 of A-H.1 or A-H.2, e.g., as shown in FIG. 1A

[0638] In some embodiments, the anti-TCRβV antibody molecule, e.g., anti-TCRβ V6 (e.g., anti-TCRβ V6-5*01) antibody molecule, comprises the heavy chain framework region 3 of A-H.1 or A-H.2, e.g., as shown in FIG. 1A.

[0639] In some embodiments, the anti-TCRβV antibody molecule, e.g., anti-TCRβ V6 (e.g., anti-TCRβ V6-5*01) antibody molecule, comprises the heavy chain framework region 4 of A-H.1 or A-H.2, e.g., as shown in FIG. 1A.

[0640] In some embodiments, the anti-TCRβV antibody molecule, e.g., anti-TCRβ V6 (e.g., anti-TCRβ V6-5*01) antibody molecule, comprises a heavy chain variable domain comprising a framework region, e.g., framework region 3 (FR3), comprising a change, e.g., a substitution (e.g., a conservative substitution) at a position disclosed herein according to Kabat numbering. In some embodiments, FR3 comprises a Threonine at position 73, e.g., a substitution at position 73 according to Kabat numbering, e.g., a Glutamic Acid to Threonine substitution. In some embodiments, FR3 comprises a Glycine at position 94, e.g., a substitution at position 94 according to Kabat numbering, e.g., an Arginine to Glycine substitution. In some embodiments, the substitution is relative to a human germline heavy chain framework region sequence.

[0641] In some embodiments, the anti-TCRβV antibody molecule, e.g., anti-TCRβ V6 (e.g., anti-TCRβ V6-5*01) antibody molecule, comprises a heavy chain variable domain comprising a framework region 3 (FR3) comprising a Threonine at position 73, e.g., a substitution at position 73 according to Kabat numbering, e.g., a Glutamic Acid to Threonine substitution, and a Glycine at position 94, e.g., a substitution at position 94 according to Kabat numbering, e.g., a Arginine to Glycine substitution, e.g., as shown in the amino acid sequence of SEQ ID NO: 10.

[0642] In some embodiments, the anti-TCRβV antibody molecule, e.g., anti-TCRβ V6 (e.g., anti-TCRβ V6-5*01) antibody molecule, comprises the heavy chain framework regions 1˜4 of A-H.1 or A-H.2, e.g., SEQ ID NO: 9, or as shown in FIGS. 1A and 1B.

[0643] In some embodiments, the anti-TCRβV antibody molecule, e.g., anti-TCRβ V6 (e.g., anti-TCRβ V6-5*01) antibody molecule, comprises the light chain framework regions 1˜4 of A-H.1, e.g., SEQ ID NO: 10, or as shown in FIGS. 1A and 1B.

[0644] In some embodiments, the anti-TCRβV antibody molecule, e.g., anti-TCRβ V6 (e.g., anti-TCRβ V6-5*01) antibody molecule, comprises the light chain framework regions 1˜4 of A-H.2, e.g., SEQ ID NO: 11, or as shown in FIGS. 1A and 1B.

[0645] In some embodiments, the anti-TCRβV antibody molecule, e.g., anti-TCRβ V6 (e.g., anti-TCRβ V6-5*01) antibody molecule, comprises the heavy chain framework regions 1-4 of A-H.1, e.g., SEQ ID NO: 9; and the light chain framework regions 1˜4 of A-H.1, e.g., SEQ ID NO: 10, or as shown in FIGS. 1A and 1B.

[0646] In some embodiments, the anti-TCRβV antibody molecule, e.g., anti-TCβ V6 (e.g., anti-TCβ V6-5*01) antibody molecule, comprises the heavy chain framework regions 1-4 of A-H.2, e.g., SEQ ID NO: 9; and the light chain framework regions 1˜4 of A-H.2, e.g., SEQ ID NO: 11, or as shown in FIGS. 1A and 1B.

[0647] In some embodiments, the heavy or light chain variable domain, or both, of the anti-TCRβ V antibody molecule, e.g., anti-TCβ V6 (e.g., anti-TCβ V6-5*01) antibody molecule, includes an amino acid sequence, which is substantially identical to an amino acid disclosed herein, e.g., at least 80%, 85%, 90%, 92%, 95%, 97%, 98%, 99% or higher identical to a variable region of an antibody described herein, e.g., an antibody chosen from any one of A-H.1 to A-H.85, e.g., A-H.1, A-H.2 or A-H.68, or as described in Table 1, or encoded by the nucleotide sequence in Table 1; or which differs at least 1 or 5 residues, but less than 40, 30, 20, or 10 residues, from a variable region of an antibody described herein.

[0648] In some embodiments, the anti-TCRβV antibody molecule, e.g., anti-TCβ V6 (e.g., anti-TCβ V6-5*01) antibody molecule, comprises at least one, two, three, or four antigen-binding regions, e.g., variable regions, having an amino acid sequence as set forth in Table 1, or a sequence substantially identical thereto (e.g., a sequence at least about 85%, 90%, 95%, 99% or more identical thereto, or which differs by no more than 1, 2, 5, 10, or 15 amino acid residues from the sequences shown in Table 1. In another embodiment, the anti-TCRβV antibody molecule, e.g., anti-TCRβ V6 (e.g., anti-TCβ V6-5*01) antibody molecule includes a VH and/or VL domain encoded by a nucleic acid having a nucleotide sequence as set forth in Table 1, or a sequence substantially identical thereto (e.g., a sequence at least about 85%, 90%, 95%, 99% or more identical thereto, or which differs by no more than 3, 6, 15, 30, or 45 nucleotides from the sequences shown in Table 1.

[0649] In some embodiments, the anti-TCRβV antibody molecule, e.g., anti-TCβ V6 (e.g., anti-TCβ V6-5*01) antibody molecule, comprises:

[0650] a VH domain comprising the amino acid sequence of SEQ ID NO: 9, an amino acid sequence at least about 85%, 90%, 95%, 99% or more identical to the amino acid sequence of SEQ ID NO: 9, or an amino acid sequence which differs by no more than 1, 2, 5, 10, or 15 amino acid residues from the amino acid sequence of SEQ ID NO: 9; and/or

[0651] a VL domain comprising the amino acid sequence of SEQ ID NO: 10, an amino acid sequence at least about 85%, 90%, 95%, 99% or more identical to the amino acid sequence of SEQ ID NO: 10, or an amino acid sequence which differs by no more than 1, 2, 5, 10, or 15 amino acid residues from the amino acid sequence of SEQ ID NO: 10.

[0652] In some embodiments, the anti-TCRβV antibody molecule, e.g., anti-TCβ V6 (e.g., anti-TCβ V6-5*01) antibody molecule, comprises:

[0653] a VH domain comprising the amino acid sequence of SEQ ID NO: 9, an amino acid sequence at least about 85%, 90%, 95%, 99% or more identical to the amino acid sequence of SEQ ID NO: 9, or an amino acid sequence which differs by no more than 1, 2, 5, 10, or 15 amino acid residues from the amino acid sequence of SEQ ID NO: 9; and/or

[0654] a VL domain comprising the amino acid sequence of SEQ ID NO: 11, an amino acid sequence at least about 85%, 90%, 95%, 99% or more identical to the amino acid sequence of SEQ ID NO: 11, or an amino acid sequence which differs by no more than 1, 2, 5, 10, or 15 amino acid residues from the amino acid sequence of SEQ ID NO: 11.

[0655] In some embodiments, the anti-TCRβV antibody molecule, e.g., anti-TCβ V6 (e.g., anti-TCβ V6-5*01) antibody molecule is a full antibody or fragment thereof (e.g., a Fab, F(ab′)2, Fv, or a single chain Fv fragment (scFv)). In embodiments, the anti-TCRβV antibody molecule, e.g., anti-TCβ V6 (e.g., anti-TCβ V6-5*01) antibody molecule is a monoclonal antibody or an antibody with single specificity. In some embodiments, the anti-TCRβV antibody molecule, e.g., anti-TCβ V6 (e.g., anti-TCβ V6-5*01) antibody molecule, can also be a humanized, chimeric, camelid, shark, or an in vitro-generated antibody molecule. In some embodiments, the anti-TCRβV antibody molecule, e.g., anti-TCβ V6 (e.g., anti-TCβ V6-5*01) antibody molecule, is a humanized antibody molecule. The heavy and light chains of the anti-TCRβV antibody molecule, e.g., anti-TCβ V6 (e.g., anti-TCβ V6-5*01) antibody molecule, can be full-length (e.g., an antibody can include at least one, and preferably two, complete heavy chains, and at least one, and preferably two, complete light chains) or can include an antigen-binding fragment (e.g., a Fab, F(ab′)2, Fv, a single chain Fv fragment, a single domain antibody, a diabody (dAb), a bivalent antibody, or bispecific antibody or fragment thereof, a single domain variant thereof, or a camelid antibody).

[0656] In some embodiments, the anti-TCRβV antibody molecule, e.g., anti-TCβ V6 (e.g., anti-TCβ V6-5*01) antibody molecule, is in the form of a multispecific molecule, e.g., a bispecific molecule, e.g., as described herein.

[0657] In some embodiments, the anti-TCRβV antibody molecule, e.g., anti-TCβ V6 (e.g., anti-TCRβ V6-5*01) antibody molecule, has a heavy chain constant region (Fc) chosen from, e.g., the heavy chain constant regions of IgG1, IgG2, IgG3, IgG4, IgM, IgA1, IgA2, IgD, and IgE. In some embodiments, the Fc region is chosen from the heavy chain constant regions of IgG1, IgG2, IgG3, and IgG4. In some embodiments, the Fc region is chosen from the heavy chain constant region of IgG1 or IgG2 (e.g., human IgG1, or IgG2). In some embodiments, the heavy chain constant region is human IgG1. In some embodiments, the Fc region comprises a Fc region variant, e.g., as described herein.

[0658] In some embodiments, the anti-TCRβV antibody molecule, e.g., anti-TCRβ V6 (e.g., anti-TCRβ V6-5*01) antibody molecule, has a light chain constant region chosen from, e.g., the light chain constant regions of kappa or lambda, preferably kappa (e.g., human kappa). In one embodiment, the constant region is altered, e.g., mutated, to modify the properties of the anti-TCRβV antibody molecule, e.g., anti-TCRβ V6 (e.g., anti-TCRβ V6-5*01) antibody molecule (e.g., to increase or decrease one or more of: Fc receptor binding, antibody glycosylation, the number of cysteine residues, effector cell function, or complement function). For example, the constant region is mutated at positions 296 (M to Y), 298 (S to T), 300 (T to E), 477 (H to K) and 478 (N to F) to alter Fc receptor binding (e.g., the mutated positions correspond to positions 132 (M to Y), 134 (S to T), 136 (T to E), 313 (H to K) and 314 (N to F) of SEQ ID NOs: 212 or 214; or positions 135 (M to Y), 137 (S to T), 139 (T to E), 316 (H to K) and 317 (N to F) of SEQ ID NOs: 215, 216, 217 or 218), e.g., relative to human IgG1.

[0659] Antibody A-H.1 comprises a heavy chain comprising the amino acid sequence of SEQ ID NO: 3278 and a light chain comprising the amino acid sequence of SEQ ID NO: 72. Antibody A-H.2 comprises a heavy chain comprising the amino acid sequence of SEQ ID NO: 3278 and a light chain comprising the amino acid sequence of SEQ ID NO: 3279. Antibody A-H.68 comprises the amino acid sequence of SEQ ID NO: 1337, or a sequence having at least 85%, 90%, 95%, 96%, 97%, 98%, or 99% identity thereto. Antibody A-H.69 comprises the amino acid sequence of SEQ ID NO: 1500, or a sequence having at least 85%, 90%, 95%, 96%, 97%, 98%, or 99% identity thereto.

[0660] Additional exemplary humanized anti-TCRB V6 antibodies are provided in Table 1. In some embodiments, the anti-TCRβ V6 is antibody A, e.g., humanized antibody A (antibody A-H), as provided in Table 1. In some embodiments, the anti-TCRβV antibody comprises one or more (e.g., all three) of a LC CDR1, LC CDR2, and LC CDR3 provided in Table 1; and/or one or more (e.g., all three) of a HC CDR1, HC CDR2, and HC CDR3 provided in Table 1, or a sequence with at least 85%, 90%, 95%, 96%, 97%, 98%, or 99% identity thereto. In some embodiments, antibody A comprises a variable heavy chain (VH) and/or a variable light chain (VL) provided in Table 1, or a sequence with at least 85%, 90%, 95%, 96%, 97%, 98%, or 99% identity thereto.

[0661] In some embodiments, the anti-TCRβV antibody molecule, e.g., anti-TCβ V6 (e.g., anti-TCβ V6-5*01) antibody molecule comprises a VH of A-H.1, A-H.2, A-H.3, A-H.4, A-H.5, A-H.6, A-H.7, A-H.8, A-H.9, A-H.10, A-H.11, A-H.12, A-H.13, A-H.14, A-H.15, A-H.16, A-H.17, A-H.18, A-H.19, A-H.20, A-H.21, A-H.22, A-H.23, A-H.24, A-H.25, A-H.26, A-H.27, A-H.28, A-H.29, A-H.30, A-H.31, A-H.32, A-H.33, A-H.34, A-H.35, A-H.36, A-H.37, A-H.38, A-H.39, A-H.40, A-H.1, A-H.42, A-H.43, A-H.44, A-H.45, A-H.46, A-H.47, A-H.48, A-H.49, A-H.50, A-H.51, A-H.52, A-H.53, A-H.54, A-H.55, A-H.56, A-H.57, A-H.58, A-H.59, A-H.60, A-H.61, A-H.62, A-H.63, A-H.64, A-H.65, A-H.66, A-H.67, A-H.68, A-H.69, A-H.70, A-H.71, A-H.72, A-H.73, A-H.74, A-H.75, A-H.76, A-H.77, A-H.78, A-H.79, A-H.80, A-H.81, A-H.82, A-H.83, A-H.84, or A-H.85, or a sequence with at least 80%, 85%, 90%, 95%, 96%, 97%, 98%, 99% or more identity thereto.

[0662] In some embodiments, the anti-TCRβV antibody molecule, e.g., anti-TCβ V6 (e.g., anti-TCβ V6-5*01) antibody molecule comprises a VL of A-H.1, A-H.2, A-H.3, A-H.4, A-H.5, A-H.6, A-H.7, A-H.8, A-H.9, A-H.10, A-H.11, A-H.12, A-H.13, A-H.14, A-H.15, A-H.16, A-H.17, A-H.18, A-H.19, A-H.20, A-H.21, A-H.22, A-H.23, A-H.24, A-H.25, A-H.26, A-H.27, A-H.28, A-H.29, A-H.30, A-H.31, A-H.32, A-H.33, A-H.34, A-H.35, A-H.36, A-H.37, A-H.38, A-H.39, A-H.40, A-H.1, A-H.42, A-H.43, A-H.44, A-H.45, A-H.46, A-H.47, A-H.48, A-H.49, A-H.50, A-H.51, A-H.52, A-H.53, A-H.54, A-H.55, A-H.56, A-H.57, A-H.58, A-H.59, A-H.60, A-H.61, A-H.62, A-H.63, A-H.64, A-H.65, A-H.66, A-H.67, A-H.68, A-H.69, A-H.70, A-H.71, A-H.72, A-H.73, A-H.74, A-H.75, A-H.76, A-H.77, A-H.78, A-H.79, A-H.80, A-H.81, A-H.82, A-H.83, A-H.84, or A-H.85, or a sequence with at least 80%, 85%, 90%, 95%, 96%, 97%, 98%, 99% or more identity thereto.

[0663] In some embodiments, the anti-TCRβV antibody molecule, e.g., anti-TCβ V6 (e.g., anti-TCβ V6-5*01) antibody molecule comprises a VH of A-H.1, A-H.2, A-H.3, A-H.4, A-H.5, A-H.6, A-H.7, A-H.8, A-H.9, A-H.10, A-H.11, A-H.12, A-H.13, A-H.14, A-H.15, A-H.16, A-H.17, A-H.18, A-H.19, A-H.20, A-H.21, A-H.22, A-H.23, A-H.24, A-H.25, A-H.26, A-H.27, A-H.28, A-H.29, A-H.30, A-H.31, A-H.32, A-H.33, A-H.34, A-H.35, A-H.36, A-H.37, A-H.38, A-H.39, A-H.40, A-H.1, A-H.42, A-H.43, A-H.44, A-H.45, A-H.46, A-H.47, A-H.48, A-H.49, A-H.50, A-H.51, A-H.52, A-H.53, A-H.54, A-H.55, A-H.56, A-H.57, A-H.58, A-H.59, A-H.60, A-H.61, A-H.62, A-H.63, A-H.64, A-H.65, A-H.66, A-H.67, A-H.68, A-H.69, A-H.70, A-H.71, A-H.72, A-H.73, A-H.74, A-H.75, A-H.76, A-H.77, A-H.78, A-H.79, A-H.80, A-H.81, A-H.82, A-H.83, A-H.84, or A-H.85, or a sequence with at least 80%, 85%, 90%, 95%, 96%, 97%, 98%, 99% or more identity thereto; and a VL of A-H.1, A-H.2, A-H.3, A-H.4, A-H.5, A-H.6, A-H.7, A-H.8, A-H.9, A-H.10, A-H.11, A-H.12, A-H.13, A-H.14, A-H.15, A-H.16, A-H.17, A-H.18, A-H.19, A-H.20, A-H.21, A-H.22, A-H.23, A-H.24, A-H.25, A-H.26, A-H.27, A-H.28, A-H.29, A-H.30, A-H.31, A-H.32, A-H.33, A-H.34, A-H.35, A-H.36, A-H.37, A-H.38, A-H.39, A-H.40, A-H.1, A-H.42, A-H.43, A-H.44, A-H.45, A-H.46, A-H.47, A-H.48, A-H.49, A-H.50, A-H.51, A-H.52, A-H.53, A-H.54, A-H.55, A-H.56, A-H.57, A-H.58, A-H.59, A-H.60, A-H.61, A-H.62, A-H.63, A-H.64, A-H.65, A-H.66, A-H.67, A-H.68, A-H.69, A-H.70, A-H.71, A-H.72, A-H.73, A-H.74, A-H.75, A-H.76, A-H.77, A-H.78, A-H.79, A-H.80, A-H.81, A-H.82, A-H.83, A-H.84, or A-H.85, or a sequence with at least 80%, 85%, 90%, 95%, 96%, 97%, 98%, 99% or more identity thereto.

TABLE 1
Amino acid and nucleotide sequences for murine, chimeric and humanized antibody
molecules which bind to TCRVB 6, e.g., TCRVB 6-5. The antibody molecules include murine mAb
Antibody A, and humanized mAb Antibody A-H Clones A-H.1 to A-H.85. The amino acid the
heavy and light chain CDRs, and the amino acid and nucleotide sequences of the heavy and
light chain variable regions, and the heavy and light chains are shown.
Antibody A (murine), also referred to as H131, TCRVB 6-5 binder

| | | |
|---|---|---|
| SEQ ID NO: 3 | HC CDR1 (Combined) | GYSFTTYYIH |
| SEQ ID NO: 4 | HC CDR2 (Combined) | WFFPGSGNIKYNEKFKG |
| SEQ ID NO: 5 | HC CDR3 (Combined) | SYYSYDVLDY |
| SEQ ID NO: 45 | HC CDR1 (Kabat) | TYYIH |
| SEQ ID NO: 46 | HC CDR2 (Kabat) | WFFPGSGNIKYNEKFKG |
| SEQ ID NO: 47 | HC CDR3 (Kabat) | SYYSYDVLDY |
| SEQ ID NO: 48 | HC CDR1 (Chothia) | GYSFTTY |
| SEQ ID NO: 49 | HC CDR2 (Chothia) | FPGSGN |
| SEQ ID NO: 50 | HC CDR3 (Chothia) | SYYSYDVLDY |
| SEQ ID NO: 1 | VH | QVQLQQSGPELVKPGTSVKISCKASGYSFTTYYIHW |
| | | VKQRPGQGLEWIGWFFPGSGNIKYNEKFKGKATLT |
| | | ADTSSSTAYMQLSSLTSEESAVYFCAGSYYSYDVLD |
| | | YWGHGTTLTVSS |
| SEQ ID NO: 6 | LC CDR1 (Combined) | KASQNVGINVV |
| SEQ ID NO: 7 | LC CDR2 (Combined) | SSSHRYS |
| SEQ ID NO: 8 | LC CDR3 (Combined) | QQFKSYPLT |
| SEQ ID NO: 51 | LC CDR1 (Kabat) | KASQNVGINVV |
| SEQ ID NO: 52 | LC CDR2 (Kabat) | SSSHRYS |
| SEQ ID NO: 53 | LC CDR3 (Kabat) | QQFKSYPLT |
| SEQ ID NO: 54 | LC CDR1 (Chothia) | KASQNVGINVV |
| SEQ ID NO: 55 | LC CDR2 (Chothia) | SSSHRYS |
| SEQ ID NO: 56 | LC CDR3 (Chothia) | QQFKSYPLT |
| SEQ ID NO: 2 | VL | DILMTQSQKFMSTSLGDRVSVSCKASQNVGINVVW |
| | | HQQKPGQSPKALIYSSSHRYSGVPDRFTGSGSGTDFT |
| | | LTINNVQSEDLAEYFCQQFKSYPLTFGAGTKLELK |

Antibody A humanized (A-H antibody), TCRVB 6-5 binder
A-H.1 antibody (also referred to as BHM1709)

| | | |
|---|---|---|
| SEQ ID NO: 3 | HC CDR1 (Combined) | GYSFTTYYIH |
| SEQ ID NO: 4 | HC CDR2 (Combined) | WFFPGSGNIKYNEKFKG |
| SEQ ID NO: 5 | HC CDR3 (Combined) | SYYSYDVLDY |
| SEQ ID NO: 9 | VH | QVQLVQSGAEVKKPGSSVKVSCKASGYSFTTYYIH |
| | | WVRQAPGQGLEWMGWFFPGSGNIKYNEKFKGRVTI |
| | | TADTSTSTAYMELSSLRSEDTAVYYCAGSYYSYDVL |
| | | DYWGQGTTVTVSS |
| SEQ ID NO: 12 | DNA VH | CAGGTGCAGCTGGTTCAGTCTGGCGCCGAAGTGA |
| | | AGAAACCTGGCTCCTCCGTGAAGGTGTCCTGCAA |
| | | GGCTTCCGGCTACTCCTTCACCACCTACTACATCC |
| | | ACTGGGTCCGACAGGCCCCTGGACAAGGATTGGA |
| | | ATGGATGGGCTGGTTCTTCCCCGGCTCCGGCAACA |
| | | TCAAGTACAACGAGAAGTTCAAGGGCCGCGTGAC |
| | | CATCACCGCCGACACCTCTACCTCTACCGCCTACA |
| | | TGGAACTGTCCAGCCTGAGATCTGAGGACACCGC |
| | | CGTGTACTACTGCGCCGGCTCCTACTACTCTTACG |
| | | ACGTGCTGGATTACTGGGGCCAGGGCACCACAGT |
| | | GACAGTGTCCTCT |
| SEQ ID NO: 69 | VH-IgM constant delta | METDTLLLWVLLLWVPGSTGQVQLVQSGAEVKKP |
| | CDC | GSSVKVSCKASGYSFTTYYIHWVRQAPGQGLEWMG |
| | | WFFPGSGNIKYNEKFKGRVTITADTSTSTAYMELSSL |
| | | RSEDTAVYYCAGSYYSYDVLDYWGQGTTVTVSSGS |
| | | ASAPTLFPLVSCENSPSDTSSVAVGCLAQDFLPDSITF |
| | | SWKYKNNSDISSTRGFPSVLRGGKYAATSQVLLPSK |
| | | DVMQGTDEHVVCKVQHPNGNKEKNVPLPVIAELPP |
| | | KVSVFVPPRDGFFGNPRKSKLICQATGFSPRQIQVSW |
| | | LREGKQVGSGVTTDQVQAEAKESGPTTYKVTSTLTI |
| | | KESDWLGQSMFTCRVDHRGLTFQQNASSMCVPDQ |
| | | DTAIRVFAIPPSFASIFLTKSTKLTCLVTDLTTYDSVTI |
| | | SWTRQNGEAVKTHTNISESHPNATFSAVGEASICED |
| | | DWNSGERFTCTVTHTDLASSLKQTISRPKGVALHRP |
| | | DVYLLPPAREQLNLRESATITCLVTGFSPADVFVQW |
| | | MQRGQPLSPEKYVTSAPMPEPQAPGRYFAHSILTVS |
| | | EEEWNTGETYTCVVAHEALPNRVTERTVDKSTGKP |
| | | TLYNVSLVMSDTAGTCY |
| SEQ ID NO: 70 | VH-IgGA1 | METDTLLLWVLLLWVPGSTGQVQLVQSGAEVKKP |
| | | GSSVKVSCKASGYSFTTYYIHWVRQAPGQGLEWMG |
| | | WFFPGSGNIKYNEKFKGRVTITADTSTSTAYMELSSL |
| | | RSEDTAVYYCAGSYYSYDVLDYWGQGTTVTVSSAS |
| | | PTSPKVFPLSLCSTQPDGNVVIACLVQGFFPQEPLSV |
| | | TWSESGQGVTARNFPPSQDASGDLYTTSSQLTLPAT |
| | | QCLAGKSVTCHVKHYTNPSQDVTVPCPVPSTPPTPS |
| | | PSTPPTPSPSCCHPRLSLHRPALEDLLLGSEANLTCTL |
| | | TGLRDASGVTFTWTPSSGKSAVQGPPERDLCGCYSV |
| | | SSVLPGCAEPWNHGKTFTCTAAYPESKTPLTATLSK |
| | | SGNTFRPEVHLLPPPSEELALNELVTLTCLARGFSPK |
| | | DVLVRWLQGSQELPREKYLTWASRQEPSQGTTTFA |
| | | VTSILRVAAEDWKKGDTFSCMVGHEALPLAFTQKTI |
| | | DRLAGKPTHVNVSVVMAEVDGTCY |
| SEQ ID NO: 71 | VH-IgGA2 | METDTLLLWVLLLWVPGSTGQVQLVQSGAEVKKP |
| | | GSSVKVSCKASGYSFTTYYIHWVRQAPGQGLEWMG |
| | | WFFPGSGNIKYNEKFKGRVTITADTSTSTAYMELSSL |
| | | RSEDTAVYYCAGSYYSYDVLDYWGQGTTVTVSSAS |
| | | PTSPKVFPLSLDSTPQDGNVVVACLVQGFFPQEPLSV |
| | | TWSESGQNVTARNFPPSQDASGDLYTTSSQLTLPAT |
| | | QCPDGKSVTCHVKHYTNSSQDVTVPCRVPPPPPCCH |
| | | PRLSLHRPALEDLLLGSEANLTCTLTGLRDASGATFT |
| | | WTPSSGKSAVQGPPERDLCGCYSVSSVLPGCAQPW |
| | | NHGETFTCTAAHPELKTPLTANITKSGNTFRPEVHLL |
| | | PPPSEELALNELVTLTCLARGFSPKDVLVRWLQGSQ |
| | | ELPREKYLTWASRQEPSQGTTTYAVTSILRVAAEDW |
| | | KKGETFSCMVGHEALPLAFTQKTIDRMAGKPTHINV |
| | | SVVMAEADGTCY |
| SEQ ID NO: | Heavy chain | METDTLLLWVLLLWVPGSTGQVQLVQSGAEVKKP |
| 3278 | | GSSVKVSCKASGYSFTTYYIHWVRQAPGQGLEWMG |
| | | WFFPGSGNIKYNEKFKGRVTITADTSTSTAYMELSSL |
| | | RSEDTAVYYCAGSYYSYDVLDYWGQGTTVTVSSAS |
| | | TKGPSVFPLAPSSKSTSGGTAALGCLVKDYFPEPVTV |
| | | SWNSGALTSGVHTFPAVLQSSGLYSLSSVVTVPSSSL |
| | | GTQTYICNVNHKPSNTKVDKRVEPKSCDKTHTCPPC |
| | | PAPELLGGPSVFLFPPKPKDTLMISRTPEVTCVVVDV |
| | | SHEDPEVKFNWYVDGVEVHNAKTKPREEQYNSTYR |
| | | VVSVLTVLHQDWLNGKEYKCKVSNKALPAPIEKTIS |
| | | KAKGQPREPQVYTLPPSREEMTKNQVSLTCLVKGF |
| | | YPSDIAVEWESNGQPENNYKTTPPVLDSDGSFFLYS |
| | | KLTVDKSRWQQGNVFSCSVMHEALHNHYTQKSLSL |
| | | SPGK |
| SEQ ID NO: 6 | LC CDR1 (Combined) | KASQNVGINVV |
| SEQ ID NO: 7 | LC CDR2 (Combined) | SSSHRYS |
| SEQ ID NO: 8 | LC CDR3 (Combined) | QQFKSYPLT |
| SEQ ID NO: 10 | VL | DIQMTQSPSFLSASVGDRVTITCKASQNVGINVVWH |
| | | QQKPGKAPKALIYSSSHRYSGVPSRFSGSGSGTEFTL |
| | | TISSLQPEDFATYFCQQFKSYPLTFGQGTKLEIK |
| SEQ ID NO: 13 | DNA VL | GACATCCAGATGACCCAGTCTCCATCCTTCCTGTC |
| | | CGCCTCTGTGGGCGACAGAGTGACCATCACATGC |
| | | AAGGCCTCTCAGAACGTGGGCATCAACGTCGTGT |
| | | GGCACCAGCAGAAGCCTGGCAAGGCTCCTAAGGC |
| | | TCTGATCTACTCCTCCAGCCACCGGTACTCTGGCG |
| | | TGCCCTCTAGATTTTCCGGCTCTGGCTCTGGCACC |
| | | GAGTTTACCCTGACAATCTCCAGCCTGCAGCCTGA |
| | | GGACTTCGCCACCTACTTTTGCCAGCAGTTCAAGA |
| | | GCTACCCTCTGACCTTTGGCCAGGGCACCAAGCTG |
| | | GAAATCAAG |
| SEQ ID NO: 72 | VL and kappa constant | METDTLLLWVLLLWVPGSTGDIQMTQSPSFLSASVG |
| | region/light chain | DRVTITCKASQNVGINVVWHQQKPGKAPKALIYSSS |
| | | HRYSGVPSRFSGSGSGTEFTLTISSLQPEDFATYFCQ |
| | | QFKSYPLTFGQGTKLEIKRTVAAPSVFIFPPSDEQLKS |
| | | GTASVVCLLNNFYPREAKVQWKVDNALQSGNSQES |
| | | VTEQDSKDSTYSLSSTLTLSKADYEKHKVYACEVTH |
| | | QGLSSPVTKSFNRGEC |

A-H.2 antibody (also referred to as BHM1710)

| | | |
|---|---|---|
| SEQ ID NO: 3 | HC CDR1 (Combined) | GYSFTTYYIH |
| SEQ ID NO: 4 | HC CDR2 (Combined) | WFFPGSGNIKYNEKFKG |
| SEQ ID NO: 5 | HC CDR3 (Combined) | SYYSYDVLDY |
| SEQ ID NO: 9 | VH | QVQLVQSGAEVKKPGSSVKVSCKASGYSFTTYYIH |
| | | WVRQAPGQGLEWMGWFFPGSGNIKYNEKFKGRVTI |
| | | TADTSTSTAYMELSSLRSEDTAVYYCAGSYYSYDVL |
| | | DYWGQGTTVTVSS |
| SEQ ID NO: 12 | DNA VH | CAGGTGCAGCTGGTTCAGTCTGGCGCCGAAGTGA |
| | | AGAAACCTGGCTCCTCCGTGAAGGTGTCCTGCAA |
| | | GGCTTCCGGCTACTCCTTCACCACCTACTACATCC |
| | | ACTGGGTCCGACAGGCCCCTGGACAAGGATTGGA |
| | | ATGGATGGGCTGGTTCTTCCCCGGCTCCGGCAACA |
| | | TCAAGTACAACGAGAAGTTCAAGGGCCGCGTGAC |
| | | CATCACCGCCGACACCTCTACCTCTACCGCCTACA |
| | | TGGAACTGTCCAGCCTGAGATCTGAGGACACCGC |
| | | CGTGTACTACTGCGCCGGCTCCTACTACTCTTACG |
| | | ACGTGCTGGATTACTGGGGCCAGGGCACCACAGT |
| | | GACAGTGTCCTCT |
| SEQ ID NO: | Heavy chain | METDTLLLWVLLLWVPGSTGQVQLVQSGAEVKKP |
| 3278 | | GSSVKVSCKASGYSFTTYYIHWVRQAPGQGLEWMG |
| | | WFFPGSGNIKYNEKFKGRVTITADTSTSTAYMELSSL |
| | | RSEDTAVYYCAGSYYSYDVLDYWGQGTTVTVSSAS |
| | | TKGPSVFPLAPSSKSTSGGTAALGCLVKDYFPEPVTV |
| | | SWNSGALTSGVHTFPAVLQSSGLYSLSSVVTVPSSSL |
| | | GTQTYICNVNHKPSNTKVDKRVEPKSCDKTHTCPPC |
| | | PAPELLGGPSVFLFPPKPKDTLMISRTPEVTCVVVDV |
| | | SHEDPEVKFNWYVDGVEVHNAKTKPREEQYNSTYR |
| | | VVSVLTVLHQDWLNGKEYKCKVSNKALPAPIEKTIS |
| | | KAKGQPREPQVYTLPPSREEMTKNQVSLTCLVKGF |
| | | YPSDIAVEWESNGQPENNYKTTPPVLDSDGSFFLYS |
| | | KLTVDKSRWQQGNVFSCSVMHEALHNHYTQKSLSL |
| | | SPGK |
| SEQ ID NO: 6 | LC CDR1 (Combined) | KASQNVGINVV |
| SEQ ID NO: 7 | LC CDR2 (Combined) | SSSHRYS |
| SEQ ID NO: 8 | LC CDR3 (Combined) | QQFKSYPLT |
| SEQ ID NO: 11 | VL | DIQMTQSPSSLSASVGDRVTITCKASQNVGINVVWH |
| | | QQKPGKVPKALIYSSSHRYSGVPSRFSGSGSGTDFTL |
| | | TISSLQPEDVATYFCQQFKSYPLTFGQGTKLEIK |
| SEQ ID NO: 14 | DNA VL | GACATCCAGATGACCCAGTCTCCATCCTCTCTGTC |
| | | CGCCTCTGTGGGCGACAGAGTGACCATCACATGC |
| | | AAGGCCTCTCAGAACGTGGGCATCAACGTCGTGT |
| | | GGCACCAGCAGAAACCTGGCAAGGTGCCCAAGGC |
| | | TCTGATCTACTCCTCCAGCCACAGATACTCCGGCG |
| | | TGCCCTCTAGATTCTCCGGCTCTGGCTCTGGCACC |
| | | GACTTTACCCTGACAATCTCCAGCCTGCAGCCTGA |
| | | GGACGTGGCCACCTACTTTTGCCAGCAGTTCAAG |
| | | AGCTACCCTCTGACCTTTGGCCAGGGCACCAAGCT |
| | | GGAAATCAAG |
| SEQ ID NO: | Light chain | METDTLLLWVLLLWVPGSTGDIQMTQSPSSLSASVG |
| 3279 | | DRVTITCKASQNVGINVVWHQQKPGKVPKALIYSSS |
| | | HRYSGVPSRFSGSGSGTDFTLTISSLQPEDVATYFCQ |
| | | QFKSYPLTFGQGTKLEIKRTVAAPSVFIFPPSDEQLKS |
| | | GTASVVCLLNNFYPREAKVQWKVDNALQSGNSQES |
| | | VTEQDSKDSTYSLSSTLTLSKADYEKHKVYACEVTH |
| | | QGLSSPVTKSFNRGEC |

A-H.3 antibody

| | | |
|---|---|---|
| SEQ ID NO: 80 | VH + VL | QVQLVQSGAEVKKPGSSVKVSCKASGTDFKLTYIH |
| | | WVRQAPGQGLEWMGRVSPGSGNTKYNEKFKGRVT |
| | | ITADTSTSTAYMELSSLRSEDTAVYYCAGSYYSYDV |
| | | LDYWGQGTTVTVSSGGGGSGGGGSGGGGSGGGGS |
| | | DIQMTQSPSFLSASVGDRVTITCKASQNVEDRVAWY |
| | | QQKPGKAPKALIYSSSHRYKGVPSRFSGSGSGTEFTL |
| | | TISSLQPEDFATYFCQQFKSYPLTFGQGTKLEIK |
| SEQ ID NO: 81 | VL | DIQMTQSPSFLSASVGDRVTITCKASQNVEDRVAWY |
| | | QQKPGKAPKALIYSSSHRYKGVPSRFSGSGSGTEFTL |
| | | TISSLQPEDFATYFCQQFKSYPLTFGQGTKLEIK |
| SEQ ID NO: 82 | VH | QVQLVQSGAEVKKPGSSVKVSCKASGTDFKLTYIH |
| | | WVRQAPGQGLEWMGRVSPGSGNTKYNEKFKGRVT |
| | | ITADTSTSTAYMELSSLRSEDTAVYYCAGSYYSYDV |
| | | LDYWGQGTTVTVSS |

A-H.4

| | | |
|---|---|---|
| SEQ ID NO: 83 | VH + VL | QVQLVQSGAEVKKPGSSVKVSCKASGTDFDKIYIH |
| | | WVRQAPGQGLEWMGRISAGSGNVKYNEKFKGRVT |
| | | ITADTSTSTAYMELSSLRSEDTAVYYCAGSYYSYDV |
| | | LDYWGQGTTVTVSSGGGGSGGGGSGGGGSGGGGS |
| | | DIQMTQSPSFLSASVGDRVTITCKASQNVEDRVAWY |
| | | QQKPGKAPKALIYSSSHRYKGVPSRFSGSGSGTEFTL |
| | | TISSLQPEDFATYFCQQFKSYPLTFGQGTKLEIK |
| SEQ ID NO: 84 | VL | DIQMTQSPSFLSASVGDRVTITCKASQNVEDRVAWY |
| | | QQKPGKAPKALIYSSSHRYKGVPSRFSGSGSGTEFTL |
| | | TISSLQPEDFATYFCQQFKSYPLTFGQGTKLEIK |
| SEQ ID NO: 85 | VH | QVQLVQSGAEVKKPGSSVKVSCKASGTDFDKIYIH |
| | | WVRQAPGQGLEWMGRISAGSGNVKYNEKFKGRVT |
| | | ITADTSTSTAYMELSSLRSEDTAVYYCAGSYYSYDV |
| | | LDYWGQGTTVTVSS |

A-H.5

| | | |
|---|---|---|
| SEQ ID NO: 86 | VH + VL | QVQLVQSGAEVKKPGSSVKVSCKASGHDFRDFYIH |
| | | WVRQAPGQGLEWMGRVYPGSGSYRYNEKFKGRVT |
| | | ITADTSTSTAYMELSSLRSEDTAVYYCAGSYYSYDV |
| | | LDYWGQGTTVTVSSGGGGSGGGGSGGGGSGGGGS |
| | | DIQMTQSPSFLSASVGDRVTITCKASQNVDDRVAW |
| | | YQQKPGKAPKALIYSSSHRYKGVPSRFSGSGSGTEFT |
| | | LTISSLQPEDFATYFCQQFKSYPLTFGQGTKLEIK |
| SEQ ID NO: 87 | VL | DIQMTQSPSFLSASVGDRVTITCKASQNVDDRVAW |
| | | YQQKPGKAPKALIYSSSHRYKGVPSRFSGSGSGTEFT |
| | | LTISSLQPEDFATYFCQQFKSYPLTFGQGTKLEIK |
| SEQ ID NO: 88 | VH | QVQLVQSGAEVKKPGSSVKVSCKASGHDFRDFYIH |
| | | WVRQAPGQGLEWMGRVYPGSGSYRYNEKFKGRVT |
| | | ITADTSTSTAYMELSSLRSEDTAVYYCAGSYYSYDV |
| | | LDYWGQGTTVTVSS |

A-H.6

| | | |
|---|---|---|
| SEQ ID NO: 89 | VH + VL | QVQLVQSGAEVKKPGSSVKVSCKASGHDFKLTYIH |
| | | WVRQAPGQGLEWMGRISAGSGNVKYNEKFKGRVT |
| | | ITADTSTSTAYMELSSLRSEDTAVYYCAGSYYSYDV |
| | | LDYWGQGTTVTVSSGGGGSGGGGSGGGGSGGGGS |
| | | DIQMTQSPSFLSASVGDRVTITCKASQNVDNRVAW |
| | | YQQKPGKAPKALIYSSSHRYKGVPSRFSGSGSGTEFT |
| | | LTISSLQPEDFATYFCQQFKSYPLTFGQGTKLEIK |
| SEQ ID NO: 90 | VL | DIQMTQSPSFLSASVGDRVTITCKASQNVDNRVAW |
| | | YQQKPGKAPKALIYSSSHRYKGVPSRFSGSGSGTEFT |
| | | LTISSLQPEDFATYFCQQFKSYPLTFGQGTKLEIK |
| SEQ ID NO: 91 | VH | QVQLVQSGAEVKKPGSSVKVSCKASGHDFKLTYIH |
| | | WVRQAPGQGLEWMGRISAGSGNVKYNEKFKGRVT |
| | | ITADTSTSTAYMELSSLRSEDTAVYYCAGSYYSYDV |
| | | LDYWGQGTTVTVSS |

A-H.7

| | | |
|---|---|---|
| SEQ ID NO: 92 | VH + VL | QVQLVQSGAEVKKPGSSVKVSCKASGTDFKLTYIH |
| | | WVRQAPGQGLEWMGRIFPGSGNVKYNEKFKGRVTI |
| | | TADTSTSTAYMELSSLRSEDTAVYYCAGSYYSYDVL |
| | | DYWGQGTTVTVSSGGGGSGGGGSGGGGSGGGGSDI |
| | | QMTQSPSFLSASVGDRVTITCKASQNVENKVAWHQ |
| | | QKPGKAPKALIYSSSHRYKGVPSRFSGSGSGTEFTLT |
| | | ISSLQPEDFATYFCQQFKSYPLTFGQGTKLEIK |
| SEQ ID NO: 93 | VL | DIQMTQSPSFLSASVGDRVTITCKASQNVENKVAWH |
| | | QQKPGKAPKALIYSSSHRYKGVPSRFSGSGSGTEFTL |
| | | TISSLQPEDFATYFCQQFKSYPLTFGQGTKLEIK |
| SEQ ID NO: 94 | VH | QVQLVQSGAEVKKPGSSVKVSCKASGTDFKLTYIH |
| | | WVRQAPGQGLEWMGRIFPGSGNVKYNEKFKGRVTI |
| | | TADTSTSTAYMELSSLRSEDTAVYYCAGSYYSYDVL |
| | | DYWGQGTTVTVSS |

A-H.8

| | | |
|---|---|---|
| SEQ ID NO: 95 | VH + VL | QVQLVQSGAEVKKPGSSVKVSCKASGTDFDKIYIH |
| | | WVRQAPGQGLEWMGRIFAGSGNTKYNEKFKGRVTI |
| | | TADTSTSTAYMELSSLRSEDTAVYYCAGSYYSYDVL |
| | | DYWGQGTTVTVSSGGGGSGGGGSGGGGSGGGGSDI |
| | | QMTQSPSFLSASVGDRVTITCKASQNVDDRVAWYQ |
| | | QKPGKAPKALIYSSSHRYKGVPSRFSGSGSGTEFTLT |
| | | ISSLQPEDFATYFCQQFKSYPLTFGQGTKLEIK |
| SEQ ID NO: 96 | VL | DIQMTQSPSFLSASVGDRVTITCKASQNVDDRVAW |
| | | YQQKPGKAPKALIYSSSHRYKGVPSRFSGSGSGTEFT |
| | | LTISSLQPEDFATYFCQQFKSYPLTFGQGTKLEIK |
| SEQ ID NO: 97 | VH | QVQLVQSGAEVKKPGSSVKVSCKASGTDFDKIYIH |
| | | WVRQAPGQGLEWMGRIFAGSGNTKYNEKFKGRVTI |
| | | TADTSTSTAYMELSSLRSEDTAVYYCAGSYYSYDVL |
| | | DYWGQGTTVTVSS |

A-H.9

| | | |
|---|---|---|
| SEQ ID NO: 98 | VH + VL | QVQLVQSGAEVKKPGSSVKVSCKASGHDFDKFYIH |
| | | WVRQAPGQGLEWMGRVSAGSGNVKYNEKFKGRV |
| | | TITADTSTSTAYMELSSLRSEDTAVYYCAGSYYSYD |
| | | VLDYWGQGTTVTVSSGGGGSGGGGSGGGGSGGGG |
| | | SDIQMTQSPSFLSASVGDRVTITCKASQNVGNRVAW |
| | | YQQKPGKAPKALIYSSSHRYSGVPSRFSGSGSGTEFT |
| | | LTISSLQPEDFATYFCQQFKSYPLTFGQGTKLEIK |
| SEQ ID NO: 99 | VL | DIQMTQSPSFLSASVGDRVTITCKASQNVGNRVAW |
| | | YQQKPGKAPKALIYSSSHRYSGVPSRFSGSGSGTEFT |
| | | LTISSLQPEDFATYFCQQFKSYPLTFGQGTKLEIK |
| SEQ ID NO: 100 | VH | QVQLVQSGAEVKKPGSSVKVSCKASGHDFDKFYIH |
| | | WVRQAPGQGLEWMGRVSAGSGNVKYNEKFKGRV |
| | | TITADTSTSTAYMELSSLRSEDTAVYYCAGSYYSYD |
| | | VLDYWGQGTTVTVSSS |

A-H.10

| | | |
|---|---|---|
| SEQ ID NO: 101 | VH + VL | QVQLVQSGAEVKKPGSSVKVSCKASGHDFDKFYIH |
| | | WVRQAPGQGLEWMGRIFAGSGNVKYNEKFKGRVT |
| | | ITADTSTSTAYMELSSLRSEDTAVYYCAGSYYSYDV |
| | | LDYWGQGTTVTVSSGGGGSGGGGSGGGGSGGGGS |
| | | DIQMTQSPSFLSASVGDRVTITCKASQNVGDRVAW |
| | | YQQKPGKAPKALIYSSSHRYKGVPSRFSGSGSGTEFT |
| | | LTISSLQPEDFATYFCQQFKSYPLTFGQGTKLEIKs |
| SEQ ID NO: 102 | VL | DIQMTQSPSFLSASVGDRVTITCKASQNVGDRVAW |
| | | YQQKPGKAPKALIYSSSHRYKGVPSRFSGSGSGTEFT |
| | | LTISSLQPEDFATYFCQQFKSYPLTFGQGTKLEIK |
| SEQ ID NO: 103 | VH | QVQLVQSGAEVKKPGSSVKVSCKASGHDFDKFYIH |
| | | WVRQAPGQGLEWMGRIFAGSGNVKYNEKFKGRVT |
| | | ITADTSTSTAYMELSSLRSEDTAVYYCAGSYYSYDV |
| | | LDYWGQGTTVTVSS |

A-H.11

| | | |
|---|---|---|
| SEQ ID NO: 104 | VH + VL | QVQLVQSGAEVKKPGSSVKVSCKASGTDFKLTYIH |
| | | WVRQAPGQGLEWMGRVSPGSGNVKYNEKFKGRVT |
| | | ITADTSTSTAYMELSSLRSEDTAVYYCAGSYYSYDV |
| | | LDYWGQGTTVTVSSGGGGSGGGGSGGGGSGGGGS |
| | | DIQMTQSPSFLSASVGDRVTITCKASQNVGDRVAW |
| | | YQQKPGKAPKALIYSSSHRYKGVPSRFSGSGSGTEFT |
| | | LTISSLQPEDFATYFCQQFKSYPLTFGQGTKLEIK |
| SEQ ID NO: 105 | VL | DIQMTQSPSFLSASVGDRVTITCKASQNVGDRVAW |
| | | YQQKPGKAPKALIYSSSHRYKGVPSRFSGSGSGTEFT |
| | | LTISSLQPEDFATYFCQQFKSYPLTFGQGTKLEIK |
| SEQ ID NO: 106 | VH | QVQLVQSGAEVKKPGSSVKVSCKASGTDFKLTYIH |
| | | WVRQAPGQGLEWMGRVSPGSGNVKYNEKFKGRVT |
| | | ITADTSTSTAYMELSSLRSEDTAVYYCAGSYYSYDV |
| | | LDYWGQGTTVTVSS |

A-H.12

| | | |
|---|---|---|
| SEQ ID NO: 107 | VH + VL | QVQLVQSGAEVKKPGSSVKVSCKASGTDFDKIYIH |
| | | WVRQAPGQGLEWMGRVSAGSGNTKYNEKFKGRVT |
| | | ITADTSTSTAYMELSSLRSEDTAVYYCAGSYYSYDV |
| | | LDYWGQGTTVTVSSGGGGSGGGGSGGGGSGGGGS |
| | | DIQMTQSPSFLSASVGDRVTITCKASQNVGNRVAW |
| | | YQQKPGKAPKALIYSSSHRYKGVPSRFSGSGSGTEFT |
| | | LTISSLQPEDFATYFCQQFKSYPLTFGQGTKLEIK |
| SEQ ID NO: 108 | VL | DIQMTQSPSFLSASVGDRVTITCKASQNVGNRVAW |
| | | YQQKPGKAPKALIYSSSHRYKGVPSRFSGSGSGTEFT |
| | | LTISSLQPEDFATYFCQQFKSYPLTFGQGTKLEIK |
| SEQ ID NO: 109 | VH | QVQLVQSGAEVKKPGSSVKVSCKASGTDFDKIYIH |
| | | WVRQAPGQGLEWMGRVSAGSGNTKYNEKFKGRVT |
| | | ITADTSTSTAYMELSSLRSEDTAVYYCAGSYYSYDV |
| | | LDYWGQGTTVTVSS |

A-H.13, also referred to as A-H.69

| | | |
|---|---|---|
| SEQ ID NO: 110 | VH + VL | QVQLVQSGAEVKKPGSSVKVSCKASGTDFKLTYIH |
| | | WVRQAPGQGLEWMGRIFPGSGNVKYNEKFKGRVTI |
| | | TADTSTSTAYMELSSLRSEDTAVYYCAGSYYSYDVL |
| | | DYWGQGTTVTVSSGGGGSGGGGSGGGGSGGGGSDI |
| | | QMTQSPSFLSASVGDRVTITCKASQNVDNRVAWYQ |
| | | QKPGKAPKALIYSSSHRYKGVPSRFSGSGSGTEFTLT |
| | | ISSLQPEDFATYFCQQFKSYPLTFGQGTKLEIK |
| SEQ ID NO: 111 | VL | DIQMTQSPSFLSASVGDRVTITCKASQNVDNRVAW |
| | | YQQKPGKAPKALIYSSSHRYKGVPSRFSGSGSGTEFT |
| | | LTISSLQPEDFATYFCQQFKSYPLTFGQGTKLEIK |
| SEQ ID NO: 112 | VH | QVQLVQSGAEVKKPGSSVKVSCKASGTDFKLTYIH |
| | | WVRQAPGQGLEWMGRIFPGSGNVKYNEKFKGRVTI |
| | | TADTSTSTAYMELSSLRSEDTAVYYCAGSYYSYDVL |
| | | DYWGQGTTVTVSS |

A-H.14

| | | |
|---|---|---|
| SEQ ID NO: 113 | VH + VL | QVQLVQSGAEVKKPGSSVKVSCKASGTDFDKIYIH |
| | | WVRQAPGQGLEWMGRISAGSGNTKYNEKFKGRVTI |
| | | TADTSTSTAYMELSSLRSEDTAVYYCAGSYYSYDVL |
| | | DYWGQGTTVTVSSGGGGSGGGGSGGGGSGGGGSDI |
| | | QMTQSPSFLSASVGDRVTITCKASQNVDDRVAWYQ |
| | | QKPGKAPKALIYSSSHRYKGVPSRFSGSGSGTEFTLT |
| | | ISSLQPEDFATYFCQQFKSYPLTFGQGTKLEIK |
| SEQ ID NO: 114 | VL | DIQMTQSPSFLSASVGDRVTITCKASQNVDDRVAW |
| | | YQQKPGKAPKALIYSSSHRYKGVPSRFSGSGSGTEFT |
| | | LTISSLQPEDFATYFCQQFKSYPLTFGQGTKLEIK |
| SEQ ID NO: 115 | VH | QVQLVQSGAEVKKPGSSVKVSCKASGTDFDKIYIH |
| | | WVRQAPGQGLEWMGRISAGSGNTKYNEKFKGRVTI |
| | | TADTSTSTAYMELSSLRSEDTAVYYCAGSYYSYDVL |
| | | DYWGQGTTVTVSS |

A-H.15

| | | |
|---|---|---|
| SEQ ID NO: 116 | VH + VL | QVQLVQSGAEVKKPGSSVKVSCKASGTDFRLTYIH |
| | | WVRQAPGQGLEWMGRVSPGSGNTKYNEKFKGRVT |
| | | ITADTSTSTAYMELSSLRSEDTAVYYCAGSYYSYDV |
| | | LDYWGQGTTVTVSSGGGGSGGGGSGGGGSGGGGS |
| | | DIQMTQSPSFLSASVGDRVTITCKASQNVDNKVAW |
| | | HQQKPGKAPKALIYSSSHRYKGVPSRFSGSGSGTEFT |
| | | LTISSLQPEDFATYFCQQFKSYPLTFGQGTKLEIK |
| SEQ ID NO: 117 | VL | DIQMTQSPSFLSASVGDRVTITCKASQNVDNKVAW |
| | | HQQKPGKAPKALIYSSSHRYKGVPSRFSGSGSGTEFT |
| | | LTISSLQPEDFATYFCQQFKSYPLTFGQGTKLEIK |
| SEQ ID NO: 118 | VH | QVQLVQSGAEVKKPGSSVKVSCKASGTDFRLTYIH |
| | | WVRQAPGQGLEWMGRVSPGSGNTKYNEKFKGRVT |
| | | ITADTSTSTAYMELSSLRSEDTAVYYCAGSYYSYDV |
| | | LDYWGQGTTVTVSS |

A-H.16

| | | |
|---|---|---|
| SEQ ID NO: 119 | VH + VL | QVQLVQSGAEVKKPGSSVKVSCKASGGTFRLTYIH |
| | | WVRQAPGQGLEWMGRVYPGSGNTKYNEKFKGRVT |
| | | ITADTSTSTAYMELSSLRSEDTAVYYCAGSYYSYDV |
| | | LDYWGQGTTVTVSSGGGGSGGGGSGGGGSGGGGS |
| | | DIQMTQSPSFLSASVGDRVTITCKASQNVDDRVAW |
| | | YQQKPGKAPKALIYSSSHRYKGVPSRFSGSGSGTEFT |
| | | LTISSLQPEDFATYFCQQFKSYPLTFGQGTKLEIK |
| SEQ ID NO: 120 | VL | DIQMTQSPSFLSASVGDRVTITCKASQNVDDRVAW |
| | | YQQKPGKAPKALIYSSSHRYKGVPSRFSGSGSGTEFT |
| | | LTISSLQPEDFATYFCQQFKSYPLTFGQGTKLEIK |
| SEQ ID NO: 121 | VH | QVQLVQSGAEVKKPGSSVKVSCKASGGTFRLTYIH |
| | | WVRQAPGQGLEWMGRVYPGSGNTKYNEKFKGRVT |
| | | ITADTSTSTAYMELSSLRSEDTAVYYCAGSYYSYDV |
| | | LDYWGQGTTVTVSS |

A-H.17

| | | |
|---|---|---|
| SEQ ID NO: 122 | VH + VL | QVQLVQSGAEVKKPGSSVKVSCKASGTDFRLTYIH |
| | | WVRQAPGQGLEWMGRIFPGSGNTKYNEKFKGRVTI |
| | | TADTSTSTAYMELSSLRSEDTAVYYCAGSYYSYDVL |
| | | DYWGQGTTVTVSSGGGGSGGGGSGGGGSGGGGSDI |
| | | QMTQSPSFLSASVGDRVTITCKASQNVDDRVAWYQ |
| | | QKPGKAPKALIYSSSHRYKGVPSRFSGSGSGTEFTLT |
| | | ISSLQPEDFATYFCQQFKSYPLTFGQGTKLEIK |
| SEQ ID NO: 123 | VL | DIQMTQSPSFLSASVGDRVTITCKASQNVDDRVAW |
| | | YQQKPGKAPKALIYSSSHRYKGVPSRFSGSGSGTEFT |
| | | LTISSLQPEDFATYFCQQFKSYPLTFGQGTKLEIK |
| SEQ ID NO: 124 | VH | QVQLVQSGAEVKKPGSSVKVSCKASGTDFRLTYIH |
| | | WVRQAPGQGLEWMGRIFPGSGNTKYNEKFKGRVTI |
| | | TADTSTSTAYMELSSLRSEDTAVYYCAGSYYSYDVL |
| | | DYWGQGTTVTVSS |

A-H.18

| | | |
|---|---|---|
| SEQ ID NO: 125 | VH + VL | QVQLVQSGAEVKKPGSSVKVSCKASGTDFKLTYIH |
| | | WVRQAPGQGLEWMGRIFPGSGNVKYNEKFKGRVTI |
| | | TADTSTSTAYMELSSLRSEDTAVYYCAGSYYSYDVL |
| | | DYWGQGTTVTVSSGGGGSGGGGSGGGGSGGGGSDI |
| | | QMTQSPSFLSASVGDRVTITCKASQNVEDRVAWYQ |
| | | QKPGKAPKALIYSSSHRYKGVPSRFSGSGSGTEFTLT |
| | | ISSLQPEDFATYFCQQFKSYPLTFGQGTKLEIK |
| SEQ ID NO: 126 | VL | DIQMTQSPSFLSASVGDRVTITCKASQNVEDRVAWY |
| | | QQKPGKAPKALIYSSSHRYKGVPSRFSGSGSGTEFTL |
| | | TISSLQPEDFATYFCQQFKSYPLTFGQGTKLEIK |
| SEQ ID NO: 127 | VH | QVQLVQSGAEVKKPGSSVKVSCKASGTDFKLTYIH |
| | | WVRQAPGQGLEWMGRIFPGSGNVKYNEKFKGRVTI |
| | | TADTSTSTAYMELSSLRSEDTAVYYCAGSYYSYDVL |
| | | DYWGQGTTVTVSS |

A-H.19

| | | |
|---|---|---|
| SEQ ID NO: 128 | VH + VL | QVQLVQSGAEVKKPGSSVKVSCKASGGTFRLTYIH |
| | | WVRQAPGQGLEWMGRISAGSGNVKYNEKFKGRVT |
| | | ITADTSTSTAYMELSSLRSEDTAVYYCAGSYYSYDV |
| | | LDYWGQGTTVTVSSGGGGSGGGGSGGGGSGGGGS |
| | | DIQMTQSPSFLSASVGDRVTITCKASQNVGDRVAW |
| | | YQQKPGKAPKALIYSSSHRYKGVPSRFSGSGSGTEFT |
| | | LTISSLQPEDFATYFCQQFKSYPLTFGQGTKLEIK |
| SEQ ID NO: 129 | VL | DIQMTQSPSFLSASVGDRVTITCKASQNVGDRVAW |
| | | YQQKPGKAPKALIYSSSHRYKGVPSRFSGSGSGTEFT |
| | | LTISSLQPEDFATYFCQQFKSYPLTFGQGTKLEIK |
| SEQ ID NO: 130 | VH | QVQLVQSGAEVKKPGSSVKVSCKASGGTFRLTYIH |
| | | WVRQAPGQGLEWMGRISAGSGNVKYNEKFKGRVT |
| | | ITADTSTSTAYMELSSLRSEDTAVYYCAGSYYSYDV |
| | | LDYWGQGTTVTVSS |

A-H.20

| | | |
|---|---|---|
| SEQ ID NO: 131 | VH + VL | QVQLVQSGAEVKKPGSSVKVSCKASGGTFDKTYIH |
| | | WVRQAPGQGLEWMGRISAGSGNTKYNEKFKGRVTI |
| | | TADTSTSTAYMELSSLRSEDTAVYYCAGSYYSYDVL |
| | | DYWGQGTTVTVSSGGGGSGGGGSGGGGSGGGGSDI |
| | | QMTQSPSFLSASVGDRVTITCKASQNVDDRVAWYQ |
| | | QKPGKAPKALIYSSSHRYKGVPSRFSGSGSGTEFTLT |
| | | ISSLQPEDFATYFCQQFKSYPLTFGQGTKLEIK |
| SEQ ID NO: 132 | VL | DIQMTQSPSFLSASVGDRVTITCKASQNVDDRVAW |
| | | YQQKPGKAPKALIYSSSHRYKGVPSRFSGSGSGTEFT |
| | | LTISSLQPEDFATYFCQQFKSYPLTFGQGTKLEIK |
| SEQ ID NO: 133 | VH | QVQLVQSGAEVKKPGSSVKVSCKASGGTFDKTYIH |
| | | WVRQAPGQGLEWMGRISAGSGNTKYNEKFKGRVTI |
| | | TADTSTSTAYMELSSLRSEDTAVYYCAGSYYSYDVL |
| | | DYWGQGTTVTVSS |

A-H.21

| | | |
|---|---|---|
| SEQ ID NO: 134 | VH + VL | QVQLVQSGAEVKKPGSSVKVSCKASGHDFDKFYIH |
| | | WVRQAPGQGLEWMGRISAGSGNTKYNEKFKGRVTI |
| | | TADTSTSTAYMELSSLRSEDTAVYYCAGSYYSYDVL |
| | | DYWGQGTTVTVSSGGGGSGGGGSGGGGSGGGGSDI |
| | | QMTQSPSFLSASVGDRVTITCKASQNVDDRVAWYQ |
| | | QKPGKAPKALIYSSSHRYKGVPSRFSGSGSGTEFTLT |
| | | ISSLQPEDFATYFCQQFKSYPLTFGQGTKLEIK |
| SEQ ID NO: 135 | VL | DIQMTQSPSFLSASVGDRVTITCKASQNVDDRVAW |
| | | YQQKPGKAPKALIYSSSHRYKGVPSRFSGSGSGTEFT |
| | | LTISSLQPEDFATYFCQQFKSYPLTFGQGTKLEIK |
| SEQ ID NO: 136 | VH | QVQLVQSGAEVKKPGSSVKVSCKASGHDFDKFYIH |
| | | WVRQAPGQGLEWMGRISAGSGNTKYNEKFKGRVTI |
| | | TADTSTSTAYMELSSLRSEDTAVYYCAGSYYSYDVL |
| | | DYWGQGTTVTVSS |

A-H.22

| | | |
|---|---|---|
| SEQ ID NO: 137 | VH + VL | QVQLVQSGAEVKKPGSSVKVSCKASGTDFKLTYIH |
| | | WVRQAPGQGLEWMGRISAGSGNVKYNEKFKGRVT |
| | | ITADTSTSTAYMELSSLRSEDTAVYYCAGSYYSYDV |
| | | LDYWGQGTTVTVSSGGGGSGGGGSGGGGSGGGGS |
| | | DIQMTQSPSFLSASVGDRVTITCKASQNVDNKVAW |
| | | HQQKPGKAPKALIYSSSHRYKGVPSRFSGSGSGTEFT |
| | | LTISSLQPEDFATYFCQQFKSYPLTFGQGTKLEIK |
| SEQ ID NO: 138 | VL | DIQMTQSPSFLSASVGDRVTITCKASQNVDNKVAW |
| | | HQQKPGKAPKALIYSSSHRYKGVPSRFSGSGSGTEFT |
| | | LTISSLQPEDFATYFCQQFKSYPLTFGQGTKLEIK |
| SEQ ID NO: 139 | VH | QVQLVQSGAEVKKPGSSVKVSCKASGTDFKLTYIH |
| | | WVRQAPGQGLEWMGRISAGSGNVKYNEKFKGRVT |
| | | ITADTSTSTAYMELSSLRSEDTAVYYCAGSYYSYDV |
| | | LDYWGQGTTVTVSS |

A-H.23

| | | |
|---|---|---|
| SEQ ID NO: 140 | VH + VL | QVQLVQSGAEVKKPGSSVKVSCKASGHDFRLTYIH |
| | | WVRQAPGQGLEWMGRISAGSGNVKYNEKFKGRVT |
| | | ITADTSTSTAYMELSSLRSEDTAVYYCAGSYYSYDV |
| | | LDYWGQGTTVTVSSGGGGSGGGGSGGGGSGGGGS |
| | | DIQMTQSPSFLSASVGDRVTITCKASQNVADRVAW |
| | | YQQKPGKAPKALIYSSSHRYKGVPSRFSGSGSGTEFT |
| | | LTISSLQPEDFATYFCQQFKSYPLTFGQGTKLEIK |
| SEQ ID NO: 141 | VL | DIQMTQSPSFLSASVGDRVTITCKASQNVADRVAW |
| | | YQQKPGKAPKALIYSSSHRYKGVPSRFSGSGSGTEFT |
| | | LTISSLQPEDFATYFCQQFKSYPLTFGQGTKLEIK |
| SEQ ID NO: 142 | VH | QVQLVQSGAEVKKPGSSVKVSCKASGHDFRLTYIH |
| | | WVRQAPGQGLEWMGRISAGSGNVKYNEKFKGRVT |
| | | ITADTSTSTAYMELSSLRSEDTAVYYCAGSYYSYDV |
| | | LDYWGQGTTVTVSS |

A-H.24

| | | |
|---|---|---|
| SEQ ID NO: 143 | VH + VL | QVQLVQSGAEVKKPGSSVKVSCKASGHDFHLWYIH |
| | | WVRQAPGQGLEWMGRVSAGSGNVKYNEKFKGRV |
| | | TITADTSTSTAYMELSSLRSEDTAVYYCAGSYYSYD |
| | | VLDYWGQGTTVTVSSGGGGSGGGGSGGGGSGGGG |
| | | SDIQMTQSPSFLSASVGDRVTITCKASQNVDNKVAW |
| | | HQQKPGKAPKALIYSSSHRYKGVPSRFSGSGSGTEFT |
| | | LTISSLQPEDFATYFCQQFKSYPLTFGQGTKLEIK |
| SEQ ID NO: 144 | VL | DIQMTQSPSFLSASVGDRVTITCKASQNVDNKVAW |
| | | HQQKPGKAPKALIYSSSHRYKGVPSRFSGSGSGTEFT |
| | | LTISSLQPEDFATYFCQQFKSYPLTFGQGTKLEIK |
| SEQ ID NO: 145 | VH | QVQLVQSGAEVKKPGSSVKVSCKASGHDFHLWYIH |
| | | WVRQAPGQGLEWMGRVSAGSGNVKYNEKFKGRV |
| | | TITADTSTSTAYMELSSLRSEDTAVYYCAGSYYSYD |
| | | VLDYWGQGTTVTVSS |

A-H.25

| | | |
|---|---|---|
| SEQ ID NO: 146 | VH + VL | QVQLVQSGAEVKKPGSSVKVSCKASGHDFHLWYIH |
| | | WVRQAPGQGLEWMGRVFAGSGNTKYNEKFKGRVT |
| | | ITADTSTSTAYMELSSLRSEDTAVYYCAGSYYSYDV |
| | | LDYWGQGTTVTVSSGGGGSGGGGSGGGGSGGGGS |
| | | DIQMTQSPSFLSASVGDRVTITCKASQNVEDKVAWY |
| | | QQKPGKAPKALIYSSSHRYKGVPSRFSGSGSGTEFTL |
| | | TISSLQPEDFATYFCQQFKSYPLTFGQGTKLEIK |
| SEQ ID NO: 147 | VL | DIQMTQSPSFLSASVGDRVTITCKASQNVEDKVAWY |
| | | QQKPGKAPKALIYSSSHRYKGVPSRFSGSGSGTEFTL |
| | | TISSLQPEDFATYFCQQFKSYPLTFGQGTKLEIK |
| SEQ ID NO: 148 | VH | QVQLVQSGAEVKKPGSSVKVSCKASGHDFHLWYIH |
| | | WVRQAPGQGLEWMGRVFAGSGNTKYNEKFKGRVT |
| | | ITADTSTSTAYMELSSLRSEDTAVYYCAGSYYSYDV |
| | | LDYWGQGTTVTVSS |

A-H.26

| | | |
|---|---|---|
| SEQ ID NO: 149 | VH + VL | QVQLVQSGAEVKKPGSSVKVSCKASGTDFKLTYIH |
| | | WVRQAPGQGLEWMGRIFPGSGNTKYNEKFKGRVTI |
| | | TADTSTSTAYMELSSLRSEDTAVYYCAGSYYSYDVL |
| | | DYWGQGTTVTVSSGGGGSGGGGSGGGGSGGGGSDI |
| | | QMTQSPSFLSASVGDRVTITCKASQNVDDRVAWYQ |
| | | QKPGKAPKALIYSSSHRYKGVPSRFSGSGSGTEFTLT |
| | | ISSLQPEDFATYFCQQFKSYPLTFGQGTKLEIK |
| SEQ ID NO: 150 | VL | DIQMTQSPSFLSASVGDRVTITCKASQNVDDRVAW |
| | | YQQKPGKAPKALIYSSSHRYKGVPSRFSGSGSGTEFT |
| | | LTISSLQPEDFATYFCQQFKSYPLTFGQGTKLEIK |
| SEQ ID NO: 151 | VH | QVQLVQSGAEVKKPGSSVKVSCKASGTDFKLTYIH |
| | | WVRQAPGQGLEWMGRIFPGSGNTKYNEKFKGRVTI |
| | | TADTSTSTAYMELSSLRSEDTAVYYCAGSYYSYDVL |
| | | DYWGQGTTVTVSS |

A-H.27

| | | |
|---|---|---|
| SEQ ID NO: 153 | VH + VL | QVQLVQSGAEVKKPGSSVKVSCKASGTDFKLTYIH |
| | | WVRQAPGQGLEWMGRVSAGSGNVKYNEKFKGRV |
| | | TITADTSTSTAYMELSSLRSEDTAVYYCAGSYYSYD |
| | | VLDYWGQGTTVTVSSGGGGSGGGGSGGGGSGGGG |
| | | SDIQMTQSPSFLSASVGDRVTITCKASQNVGNRVAW |
| | | YQQKPGKAPKALIYSSSHRYKGVPSRFSGSGSGTEFT |
| | | LTISSLQPEDFATYFCQQFKSYPLTFGQGTKLEIK |
| SEQ ID NO: 154 | VL | DIQMTQSPSFLSASVGDRVTITCKASQNVGNRVAW |
| | | YQQKPGKAPKALIYSSSHRYKGVPSRFSGSGSGTEFT |
| | | LTISSLQPEDFATYFCQQFKSYPLTFGQGTKLEIK |
| SEQ ID NO: 155 | VH | QVQLVQSGAEVKKPGSSVKVSCKASGTDFKLTYIH |
| | | WVRQAPGQGLEWMGRVSAGSGNVKYNEKFKGRV |
| | | TITADTSTSTAYMELSSLRSEDTAVYYCAGSYYSYD |
| | | VLDYWGQGTTVTVSS |

A-H.28

| | | |
|---|---|---|
| SEQ ID NO: 156 | VH + VL | QVQLVQSGAEVKKPGSSVKVSCKASGTDFKLTYIH |
| | | WVRQAPGQGLEWMGRISPGSGNTKYNEKFKGRVTI |
| | | TADTSTSTAYMELSSLRSEDTAVYYCAGSYYSYDVL |
| | | DYWGQGTTVTVSSGGGGSGGGGSGGGGSGGGGSDI |
| | | QMTQSPSFLSASVGDRVTITCKASQNVGDRVAWYQ |
| | | QKPGKAPKALIYSSSHRYKGVPSRFSGSGSGTEFTLT |
| | | ISSLQPEDFATYFCQQFKSYPLTFGQGTKLEIK |
| SEQ ID NO: 157 | VL | DIQMTQSPSFLSASVGDRVTITCKASQNVGDRVAW |
| | | YQQKPGKAPKALIYSSSHRYKGVPSRFSGSGSGTEFT |
| | | LTISSLQPEDFATYFCQQFKSYPLTFGQGTKLEIK |
| SEQ ID NO: 158 | VH | QVQLVQSGAEVKKPGSSVKVSCKASGTDFKLTYIH |
| | | WVRQAPGQGLEWMGRISPGSGNTKYNEKFKGRVTI |
| | | TADTSTSTAYMELSSLRSEDTAVYYCAGSYYSYDVL |
| | | DYWGQGTTVTVSS |

A-H.29

| | | |
|---|---|---|
| SEQ ID NO: 159 | VH + VL | QVQLVQSGAEVKKPGSSVKVSCKASGHDFHLWYIH |
| | | WVRQAPGQGLEWMGRISPGSGNVKYNEKFKGRVTI |
| | | TADTSTSTAYMELSSLRSEDTAVYYCAGSYYSYDVL |
| | | DYWGQGTTVTVSSGGGGSGGGGSGGGGSGGGGSDI |
| | | QMTQSPSFLSASVGDRVTITCKASQNVGDRVAWHQ |
| | | QKPGKAPKALIYSSSHRYKGVPSRFSGSGSGTEFTLT |
| | | ISSLQPEDFATYFCQQFKSYPLTFGQGTKLEIK |
| SEQ ID NO: 160 | VL | DIQMTQSPSFLSASVGDRVTITCKASQNVGDRVAW |
| | | HQQKPGKAPKALIYSSSHRYKGVPSRFSGSGSGTEFT |
| | | LTISSLQPEDFATYFCQQFKSYPLTFGQGTKLEIK |
| SEQ ID NO: 161 | VH | QVQLVQSGAEVKKPGSSVKVSCKASGHDFHLWYIH |
| | | WVRQAPGQGLEWMGRISPGSGNVKYNEKFKGRVTI |
| | | TADTSTSTAYMELSSLRSEDTAVYYCAGSYYSYDVL |
| | | DYWGQGTTVTVSS |

A-H.31

| | | |
|---|---|---|
| SEQ ID NO: 162 | VH + VL | QVQLVQSGAEVKKPGSSVKVSCKASGHDFKLTYIH |
| | | WVRQAPGQGLEWMGRISAGSGNVKYNEKFKGRVT |
| | | ITADTSTSTAYMELSSLRSEDTAVYYCAGSYYSYDV |
| | | LDYWGQGTTVTVSSGGGGSGGGGSGGGGSGGGGS |
| | | DIQMTQSPSFLSASVGDRVTITCKASQNVDDRVAW |
| | | YQQKPGKAPKALIYSSSHRYKGVPSRFSGSGSGTEFT |
| | | LTISSLQPEDFATYFCQQFKSYPLTFGQGTKLEIK |
| SEQ ID NO: 163 | VL | DIQMTQSPSFLSASVGDRVTITCKASQNVDDRVAW |
| | | YQQKPGKAPKALIYSSSHRYKGVPSRFSGSGSGTEFT |
| | | LTISSLQPEDFATYFCQQFKSYPLTFGQGTKLEIK |
| SEQ ID NO: 164 | VH | QVQLVQSGAEVKKPGSSVKVSCKASGHDFKLTYIH |
| | | WVRQAPGQGLEWMGRISAGSGNVKYNEKFKGRVT |
| | | ITADTSTSTAYMELSSLRSEDTAVYYCAGSYYSYDV |
| | | LDYWGQGTTVTVSS |

A-H.31

| | | |
|---|---|---|
| SEQ ID NO: 165 | VH + VL | QVQLVQSGAEVKKPGSSVKVSCKASGTDFHLWYIH |
| | | WVRQAPGQGLEWMGRVFAGSGSYRYNEKFKGRVT |
| | | ITADTSTSTAYMELSSLRSEDTAVYYCAGSYYSYDV |
| | | LDYWGQGTTVTVSSGGGGSGGGGSGGGGSGGGGS |
| | | DIQMTQSPSFLSASVGDRVTITCKASQNVDDRVAW |
| | | YQQKPGKAPKALIYSSSHRYKGVPSRFSGSGSGTEFT |
| | | LTISSLQPEDFATYFCQQFKSYPLTFGQGTKLEIK |
| SEQ ID NO: 166 | VL | DIQMTQSPSFLSASVGDRVTITCKASQNVDDRVAW |
| | | YQQKPGKAPKALIYSSSHRYKGVPSRFSGSGSGTEFT |
| | | LTISSLQPEDFATYFCQQFKSYPLTFGQGTKLEIK |
| SEQ ID NO: 167 | VH | QVQLVQSGAEVKKPGSSVKVSCKASGTDFHLWYIH |
| | | WVRQAPGQGLEWMGRVFAGSGSYRYNEKFKGRVT |
| | | ITADTSTSTAYMELSSLRSEDTAVYYCAGSYYSYDV |
| | | LDYWGQGTTVTVSS |

A-H.32

| | | |
|---|---|---|
| SEQ ID NO: 168 | VH + VL | QVQLVQSGAEVKKPGSSVKVSCKASGTDFDKIYIH |
| | | WVRQAPGQGLEWMGRISAGSGNTKYNEKFKGRVTI |
| | | TADTSTSTAYMELSSLRSEDTAVYYCAGSYYSYDVL |
| | | DYWGQGTTVTVSSGGGGSGGGGSGGGGSGGGGSDI |
| | | QMTQSPSFLSASVGDRVTITCKASQNVADRVAWYQ |
| | | QKPGKAPKALIYSSSHRYKGVPSRFSGSGSGTEFTLT |
| | | ISSLQPEDFATYFCQQFKSYPLTFGQGTKLEIK |
| SEQ ID NO: 169 | VL | DIQMTQSPSFLSASVGDRVTITCKASQNVADRVAW |
| | | YQQKPGKAPKALIYSSSHRYKGVPSRFSGSGSGTEFT |
| | | LTISSLQPEDFATYFCQQFKSYPLTFGQGTKLEIK |
| SEQ ID NO: 170 | VH | QVQLVQSGAEVKKPGSSVKVSCKASGTDFDKIYIH |
| | | WVRQAPGQGLEWMGRISAGSGNTKYNEKFKGRVTI |
| | | TADTSTSTAYMELSSLRSEDTAVYYCAGSYYSYDVL |
| | | DYWGQGTTVTVSS |

A-H.33

| | | |
|---|---|---|
| SEQ ID NO: 171 | VH + VL | QVQLVQSGAEVKKPGSSVKVSCKASGTDFKLTYIH |
| | | WVRQAPGQGLEWMGRISAGSGNTKYNEKFKGRVTI |
| | | TADTSTSTAYMELSSLRSEDTAVYYCAGSYYSYDVL |
| | | DYWGQGTTVTVSSGGGGSGGGGSGGGGSGGGGSDI |
| | | QMTQSPSFLSASVGDRVTITCKASQNVEDRVAWYQ |
| | | QKPGKAPKALIYSSSHRYKGVPSRFSGSGSGTEFTLT |
| | | ISSLQPEDFATYFCQQFKSYPLTFGQGTKLEIK |
| SEQ ID NO: 172 | VL | DIQMTQSPSFLSASVGDRVTITCKASQNVEDRVAWY |
| | | QQKPGKAPKALIYSSSHRYKGVPSRFSGSGSGTEFTL |
| | | TISSLQPEDFATYFCQQFKSYPLTFGQGTKLEIK |
| SEQ ID NO: 173 | VH | QVQLVQSGAEVKKPGSSVKVSCKASGTDFKLTYIH |
| | | WVRQAPGQGLEWMGRISAGSGNTKYNEKFKGRVTI |
| | | TADTSTSTAYMELSSLRSEDTAVYYCAGSYYSYDVL |
| | | DYWGQGTTVTVSS |

A-H.34

| | | |
|---|---|---|
| SEQ ID NO: 174 | VH + VL | QVQLVQSGAEVKKPGSSVKVSCKASGTDFRLTYIH |
| | | WVRQAPGQGLEWMGRISPGSGNTKYNEKFKGRVTI |
| | | TADTSTSTAYMELSSLRSEDTAVYYCAGSYYSYDVL |
| | | DYWGQGTTVTVSSGGGGSGGGGSGGGGSGGGGSDI |
| | | QMTQSPSFLSASVGDRVTITCKASQNVGNRVAWYQ |
| | | QKPGKAPKALIYSSSHRYKGVPSRFSGSGSGTEFTLT |
| | | ISSLQPEDFATYFCQQFKSYPLTFGQGTKLEIK |
| SEQ ID NO: 175 | VL | DIQMTQSPSFLSASVGDRVTITCKASQNVGNRVAW |
| | | YQQKPGKAPKALIYSSSHRYKGVPSRFSGSGSGTEFT |
| | | LTISSLQPEDFATYFCQQFKSYPLTFGQGTKLEIK |
| SEQ ID NO: 176 | VH | QVQLVQSGAEVKKPGSSVKVSCKASGTDFRLTYIH |
| | | WVRQAPGQGLEWMGRISPGSGNTKYNEKFKGRVTI |
| | | TADTSTSTAYMELSSLRSEDTAVYYCAGSYYSYDVL |
| | | DYWGQGTTVTVSS |

A-H.35

| | | |
|---|---|---|
| SEQ ID NO: 177 | VH + VL | QVQLVQSGAEVKKPGSSVKVSCKASGHDFDKTYIH |
| | | WVRQAPGQGLEWMGRVSAGSGNVKYNEKFKGRV |
| | | TITADTSTSTAYMELSSLRSEDTAVYYCAGSYYSYD |
| | | VLDYWGQGTTVTVSSGGGGSGGGGSGGGGSGGGG |
| | | SDIQMTQSPSFLSASVGDRVTITCKASQNVEDRVAW |
| | | YQQKPGKAPKALIYSSSHRYKGVPSRFSGSGSGTEFT |
| | | LTISSLQPEDFATYFCQQFKSYPLTFGQGTKLEIK |
| SEQ ID NO: 178 | VL | DIQMTQSPSFLSASVGDRVTITCKASQNVEDRVAWY |
| | | QQKPGKAPKALIYSSSHRYKGVPSRFSGSGSGTEFTL |
| | | TISSLQPEDFATYFCQQFKSYPLTFGQGTKLEIK |
| SEQ ID NO: 179 | VH | QVQLVQSGAEVKKPGSSVKVSCKASGHDFDKTYIH |
| | | WVRQAPGQGLEWMGRVSAGSGNVKYNEKFKGRV |
| | | TITADTSTSTAYMELSSLRSEDTAVYYCAGSYYSYD |
| | | VLDYWGQGTTVTVSS |

A-H.36

| | | |
|---|---|---|
| SEQ ID NO: 180 | VH + VL | QVQLVQSGAEVKKPGSSVKVSCKASGHDFKLTYIH |
| | | WVRQAPGQGLEWMGRVSPGSGNTKYNEKFKGRVT |
| | | ITADTSTSTAYMELSSLRSEDTAVYYCAGSYYSYDV |
| | | LDYWGQGTTVTVSSGGGGSGGGGSGGGGSGGGGS |
| | | DIQMTQSPSFLSASVGDRVTITCKASQNVEDRVAWH |
| | | QQKPGKAPKALIYSSSHRYKGVPSRFSGSGSGTEFTL |
| | | TISSLQPEDFATYFCQQFKSYPLTFGQGTKLEIK |
| SEQ ID NO: 181 | VL | DIQMTQSPSFLSASVGDRVTITCKASQNVEDRVAWH |
| | | QQKPGKAPKALIYSSSHRYKGVPSRFSGSGSGTEFTL |
| | | TISSLQPEDFATYFCQQFKSYPLTFGQGTKLEIK |
| SEQ ID NO: 182 | VH | QVQLVQSGAEVKKPGSSVKVSCKASGHDFKLTYIH |
| | | WVRQAPGQGLEWMGRVSPGSGNTKYNEKFKGRVT |
| | | ITADTSTSTAYMELSSLRSEDTAVYYCAGSYYSYDV |
| | | LDYWGQGTTVTVSS |

A-H.37

| | | |
|---|---|---|
| SEQ ID NO: 183 | VH + VL | QVQLVQSGAEVKKPGSSVKVSCKASGHDFDKTYIH |
| | | WVRQAPGQGLEWMGRIYPGSGNVKYNEKFKGRVT |
| | | ITADTSTSTAYMELSSLRSEDTAVYYCAGSYYSYDV |
| | | LDYWGQGTTVTVSSGGGGSGGGGSGGGGSGGGGS |
| | | DIQMTQSPSFLSASVGDRVTITCKASQNVADRVAW |
| | | YQQKPGKAPKALIYSSSHRYKGVPSRFSGSGSGTEFT |
| | | LTISSLQPEDFATYFCQQFKSYPLTFGQGTKLEIK |
| SEQ ID NO: 184 | VL | DIQMTQSPSFLSASVGDRVTITCKASQNVADRVAW |
| | | YQQKPGKAPKALIYSSSHRYKGVPSRFSGSGSGTEFT |
| | | LTISSLQPEDFATYFCQQFKSYPLTFGQGTKLEIK |
| SEQ ID NO: 185 | VH | QVQLVQSGAEVKKPGSSVKVSCKASGHDFDKTYIH |
| | | WVRQAPGQGLEWMGRIYPGSGNVKYNEKFKGRVT |
| | | ITADTSTSTAYMELSSLRSEDTAVYYCAGSYYSYDV |
| | | LDYWGQGTTVTVSS |

A-H.38

| | | |
|---|---|---|
| SEQ ID NO: 186 | VH + VL | QVQLVQSGAEVKKPGSSVKVSCKASGTDFDKTYIH |
| | | WVRQAPGQGLEWMGRISAGSGNVKYNEKFKGRVT |
| | | ITADTSTSTAYMELSSLRSEDTAVYYCAGSYYSYDV |
| | | LDYWGQGTTVTVSSGGGGSGGGGSGGGGSGGGGS |
| | | DIQMTQSPSFLSASVGDRVTITCKASQNVDDRVAW |
| | | YQQKPGKAPKALIYSSSHRYKGVPSRFSGSGSGTEFT |
| | | LTISSLQPEDFATYFCQQFKSYPLTFGQGTKLEIK |
| SEQ ID NO: 187 | VL | DIQMTQSPSFLSASVGDRVTITCKASQNVDDRVAW |
| | | YQQKPGKAPKALIYSSSHRYKGVPSRFSGSGSGTEFT |
| | | LTISSLQPEDFATYFCQQFKSYPLTFGQGTKLEIK |
| SEQ ID NO: 188 | VH | QVQLVQSGAEVKKPGSSVKVSCKASGTDFDKTYIH |
| | | WVRQAPGQGLEWMGRISAGSGNVKYNEKFKGRVT |
| | | ITADTSTSTAYMELSSLRSEDTAVYYCAGSYYSYDV |
| | | LDYWGQGTTVTVSS |

A-H.39

| | | |
|---|---|---|
| SEQ ID NO: 189 | VH + VL | QVQLVQSGAEVKKPGSSVKVSCKASGTDFDKIYIH |
| | | WVRQAPGQGLEWMGRISAGSGNIKYNEKFKGRVTI |
| | | TADTSTSTAYMELSSLRSEDTAVYYCAGSYYSYDVL |
| | | DYWGQGTTVTVSSGGGGSGGGGSGGGGSGGGGSDI |
| | | QMTQSPSFLSASVGDRVTITCKASQNVDDRVAWYQ |
| | | QKPGKAPKALIYSSSHRYKGVPSRFSGSGSGTEFTLT |
| | | ISSLQPEDFATYFCQQFKSYPLTFGQGTKLEIK |
| SEQ ID NO: 190 | VL | DIQMTQSPSFLSASVGDRVTITCKASQNVDDRVAW |
| | | YQQKPGKAPKALIYSSSHRYKGVPSRFSGSGSGTEFT |
| | | LTISSLQPEDFATYFCQQFKSYPLTFGQGTKLEIK |
| SEQ ID NO: 191 | VH | QVQLVQSGAEVKKPGSSVKVSCKASGTDFDKIYIH |
| | | WVRQAPGQGLEWMGRISAGSGNIKYNEKFKGRVTI |
| | | TADTSTSTAYMELSSLRSEDTAVYYCAGSYYSYDVL |
| | | DYWGQGTTVTVSS |

A-H.40

| | | |
|---|---|---|
| SEQ ID NO: 192 | VH + VL | QVQLVQSGAEVKKPGSSVKVSCKASGTDFDKIYIH |
| | | WVRQAPGQGLEWMGRISAGSGNVKYNEKFKGRVT |
| | | ITADTSTSTAYMELSSLRSEDTAVYYCAGSYYSYDV |
| | | LDYWGQGTTVTVSSGGGGSGGGGSGGGGSGGGGS |
| | | DIQMTQSPSFLSASVGDRVTITCKASQNVGDRVAW |
| | | YQQKPGKAPKALIYSSSHRYKGVPSRFSGSGSGTEFT |
| | | LTISSLQPEDFATYFCQQFKSYPLTFGQGTKLEIK |
| SEQ ID NO: 193 | VL | DIQMTQSPSFLSASVGDRVTITCKASQNVGDRVAW |
| | | YQQKPGKAPKALIYSSSHRYKGVPSRFSGSGSGTEFT |
| | | LTISSLQPEDFATYFCQQFKSYPLTFGQGTKLEIK |
| SEQ ID NO: 194 | VH | QVQLVQSGAEVKKPGSSVKVSCKASGTDFDKIYIH |
| | | WVRQAPGQGLEWMGRISAGSGNVKYNEKFKGRVT |
| | | ITADTSTSTAYMELSSLRSEDTAVYYCAGSYYSYDV |
| | | LDYWGQGTTVTVSS |

A-H.41

| | | |
|---|---|---|
| SEQ ID NO: 195 | VH + VL | QVQLVQSGAEVKKPGSSVKVSCKASGGTFKLTYIH |
| | | WVRQAPGQGLEWMGRVSAGSGNVKYNEKFKGRV |
| | | TITADTSTSTAYMELSSLRSEDTAVYYCAGSYYSYD |
| | | VLDYWGQGTTVTVSSGGGGSGGGGSGGGGSGGGG |
| | | SDIQMTQSPSFLSASVGDRVTITCKASQNVDDRVAW |
| | | YQQKPGKAPKALIYSSSHRYKGVPSRFSGSGSGTEFT |
| | | LTISSLQPEDFATYFCQQFKSYPLTFGQGTKLEIK |
| SEQ ID NO: 196 | VL | DIQMTQSPSFLSASVGDRVTITCKASQNVDDRVAW |
| | | YQQKPGKAPKALIYSSSHRYKGVPSRFSGSGSGTEFT |
| | | LTISSLQPEDFATYFCQQFKSYPLTFGQGTKLEIK |
| SEQ ID NO: 197 | VH | QVQLVQSGAEVKKPGSSVKVSCKASGGTFKLTYIH |
| | | WVRQAPGQGLEWMGRVSAGSGNVKYNEKFKGRV |
| | | TITADTSTSTAYMELSSLRSEDTAVYYCAGSYYSYD |
| | | VLDYWGQGTTVTVSS |

A-H.42

| | | |
|---|---|---|
| SEQ ID NO: 198 | VH + VL | QVQLVQSGAEVKKPGSSVKVSCKASGTDFKLTYIH |
| | | WVRQAPGQGLEWMGRISPGSGNVKYNEKFKGRVTI |
| | | TADTSTSTAYMELSSLRSEDTAVYYCAGSYYSYDVL |
| | | DYWGQGTTVTVSSGGGGSGGGGSGGGGSGGGGSDI |
| | | QMTQSPSFLSASVGDRVTITCKASQNVDNRVAWHQ |
| | | QKPGKAPKALIYSSSHRYKGVPSRFSGSGSGTEFTLT |
| | | ISSLQPEDFATYFCQQFKSYPLTFGQGTKLEIK |
| SEQ ID NO: 199 | VL | DIQMTQSPSFLSASVGDRVTITCKASQNVDNRVAW |
| | | HQQKPGKAPKALIYSSSHRYKGVPSRFSGSGSGTEFT |
| | | LTISSLQPEDFATYFCQQFKSYPLTFGQGTKLEIK |
| SEQ ID NO: 200 | VH | QVQLVQSGAEVKKPGSSVKVSCKASGTDFKLTYIH |
| | | WVRQAPGQGLEWMGRISPGSGNVKYNEKFKGRVTI |
| | | TADTSTSTAYMELSSLRSEDTAVYYCAGSYYSYDVL |
| | | DYWGQGTTVTVSS |

A-H.43

| | | |
|---|---|---|
| SEQ ID NO: 201 | VH + VL | QVQLVQSGAEVKKPGSSVKVSCKASGHDFDKFYIH |
| | | WVRQAPGQGLEWMGRVSAGSGNTKYNEKFKGRVT |
| | | ITADTSTSTAYMELSSLRSEDTAVYYCAGSYYSYDV |
| | | LDYWGQGTTVTVSSGGGGSGGGGSGGGGSGGGGS |
| | | DIQMTQSPSFLSASVGDRVTITCKASQNVDNRVAW |
| | | YQQKPGKAPKALIYSSSHRYKGVPSRFSGSGSGTEFT |
| | | LTISSLQPEDFATYFCQQFKSYPLTFGQGTKLEIK |
| SEQ ID NO: 202 | VL | DIQMTQSPSFLSASVGDRVTITCKASQNVDNRVAW |
| | | YQQKPGKAPKALIYSSSHRYKGVPSRFSGSGSGTEFT |
| | | LTISSLQPEDFATYFCQQFKSYPLTFGQGTKLEIK |
| SEQ ID NO: 203 | VH | QVQLVQSGAEVKKPGSSVKVSCKASGHDFDKFYIH |
| | | WVRQAPGQGLEWMGRVSAGSGNTKYNEKFKGRVT |
| | | ITADTSTSTAYMELSSLRSEDTAVYYCAGSYYSYDV |
| | | LDYWGQGTTVTVSS |

A-H.44

| | | |
|---|---|---|
| SEQ ID NO: 204 | VH + VL | QVQLVQSGAEVKKPGSSVKVSCKASGTDFDKFYIH |
| | | WVRQAPGQGLEWMGRVSAGSGNVKYNEKFKGRV |
| | | TITADTSTSTAYMELSSLRSEDTAVYYCAGSYYSYD |
| | | VLDYWGQGTTVTVSSGGGGSGGGGSGGGGSGGGG |
| | | SDIQMTQSPSFLSASVGDRVTITCKASQNVGDRVVW |
| | | YQQKPGKAPKALIYSSSHRYKGVPSRFSGSGSGTEFT |
| | | LTISSLQPEDFATYFCQQFKSYPLTFGQGTKLEIK |
| SEQ ID NO: 205 | VH | QVQLVQSGAEVKKPGSSVKVSCKASGTDFDKFYIH |
| | | WVRQAPGQGLEWMGRVSAGSGNVKYNEKFKGRV |
| | | TITADTSTSTAYMELSSLRSEDTAVYYCAGSYYSYD |
| | | VLDYWGQGTTVTVSS |

A-H.45

| | | |
|---|---|---|
| SEQ ID NO: 206 | VH + VL | QVQLVQSGAEVKKPGSSVKVSCKASGYSFTTYYIH |
| | | WVRQAPGQGLEWMGWFSAGSGNTKYNEKFKGRV |
| | | TITADTSTSTAYMELSSLRSEDTAVYYCAVSYYSYD |
| | | VLDYWGQGTTVTVSSGGGGSGGGGSGGGGSGGGG |
| | | SDIQMTQSPSFLSASVGDRVTITCKASQNVGINVVW |
| | | HQQKPGKAPKALIYSSSHRYSGVPSRFSGSGSGTEFT |
| | | LTISSLQPEDFATYFCQQFKSYPLTFGQGTKLEIK |
| SEQ ID NO: 207 | VH | QVQLVQSGAEVKKPGSSVKVSCKASGYSFTTYYIH |
| | | WVRQAPGQGLEWMGWFSAGSGNTKYNEKFKGRV |
| | | TITADTSTSTAYMELSSLRSEDTAVYYCAVSYYSYD |
| | | VLDYWGQGTTVTVSS |

A-H.46

| | | |
|---|---|---|
| SEQ ID NO: 208 | VH + VL | QVQLVQSGAEVKKPGSSVKVSCKASGYSFTTYYIH |
| | | WVRQAPGQGLEWMGWFSAGSGNTKYNEKFKGRV |
| | | TITADTSTSTAYMELSSLRSEDTAVYYCAGSYYSYD |
| | | VLDYWGQGTTVTVSSGGGGSGGGGSGGGGSGGGG |
| | | SDIQMTQSPSFLSASVGDRVTITCKASQNVGINVVW |
| | | HQQKPGKAPKALIYSSSHRYSGVPSRFSGSGSGTEFT |
| | | LTISSLQPEDFATYFCQQFKSYPLTFGQGTKLEIK |
| SEQ ID NO: 209 | VH | QVQLVQSGAEVKKPGSSVKVSCKASGYSFTTYYH |
| | | WVRQAPGQGLEWMGWFSAGSGNTKYNEKFKGRV |
| | | TITADTSTSTAYMELSSLRSEDTAVYYCAGSYYSYD |
| | | VLDYWGQGTTVTVSS |

A-H.47

| | | |
|---|---|---|
| SEQ ID NO: 210 | VH + VL | QVQLVQSGAEVKKPGSSVKVSCKASGYSFTTYYIH |
| | | WVRQAPGQGLEWMGWFFPGSGNTKYNEKFKGRVT |
| | | ITADTSTSTAYMELSSLRSEDTAVYYCAGSYYSYDV |
| | | LDYWGQGTTVTVSSGGGGSGGGGSGGGGSGGGGS |
| | | DIQMTQSPSFLSASVGDRVTITCKASQNVGINVVWH |
| | | QQKPGKAPKALIYSSSHRYSGVPSRFSGSGSGTEFTL |
| | | TISSLQPEDFATYFCQQFKSYPLTFGQGTKLEIK |
| SEQ ID NO: 211 | VH | QVQLVQSGAEVKKPGSSVKVSCKASGYSFTTYYIH |
| | | WVRQAPGQGLEWMGWFFPGSGNTKYNEKFKGRVT |
| | | ITADTSTSTAYMELSSLRSEDTAVYYCAGSYYSYDV |
| | | LDYWGQGTTVTVSS |

A-H.48

| | | |
|---|---|---|
| SEQ ID NO: 212 | VH + VL | QVQLVQSGAEVKKPGSSVKVSCKASGYSFTTYYIH |
| | | WVRQAPGQGLEWMGWFSPGSGNTKYNEKFKGRVT |
| | | ITADTSTSTAYMELSSLRSEDTAVYYCAVSYYSYDV |
| | | LDYWGQGTTVTVSSGGGGSGGGGSGGGGSGGGGS |
| | | DIQMTQSPSFLSASVGDRVTITCKASQNVGINVVWH |
| | | QQKPGKAPKALIYSSSHRYSGVPSRFSGSGSGTEFTL |
| | | TISSLQPEDFATYFCQQFKSYPLTFGQGTKLEIK |
| SEQ ID NO: 213 | VH | QVQLVQSGAEVKKPGSSVKVSCKASGYSFTTYYIH |
| | | WVRQAPGQGLEWMGWFSPGSGNTKYNEKFKGRVT |
| | | ITADTSTSTAYMELSSLRSEDTAVYYCAVSYYSYDV |
| | | LDYWGQGTTVTVSS |

A-H.49

| | | |
|---|---|---|
| SEQ ID NO: 214 | VH + VL | QVQLVQSGAEVKKPGSSVKVSCKASGYSFTTYYIH |
| | | WVRQAPGQGLEWMGWFSPGSGNTKYNEKFKGRVT |
| | | ITADTSTSTAYMELSSLRSEDTAVYYCAGSYYSYDV |
| | | LDYWGQGTTVTVSSGGGGSGGGGSGGGGSGGGGS |
| | | DIQMTQSPSFLSASVGDRVTITCKASQNVGINVVWH |
| | | QQKPGKAPKALIYSSSHRYSGVPSRFSGSGSGTEFTL |
| | | TISSLQPEDFATYFCQQFKSYPLTFGQGTKLEIK |
| SEQ ID NO: 215 | VH | QVQLVQSGAEVKKPGSSVKVSCKASGYSFTTYYIH |
| | | WVRQAPGQGLEWMGWFSPGSGNTKYNEKFKGRVT |
| | | ITADTSTSTAYMELSSLRSEDTAVYYCAGSYYSYDV |
| | | LDYWGQGTTVTVSS |

A-H.50

| | | |
|---|---|---|
| SEQ ID NO: 216 | VH + VL | QVQLVQSGAEVKKPGSSVKVSCKASGYSFTTYYIH |
| | | WVRQAPGQGLEWMGRIFPGSGNIKYNEKFKGRVTI |
| | | TADTSTSTAYMELSSLRSEDTAVYYCAGSYYSYDVL |
| | | DYWGQGTTVTVSSGGGGSGGGGSGGGGSGGGGSDI |
| | | QMTQSPSFLSASVGDRVTITCKASQNVGINVVWHQ |
| | | QKPGKAPKALIYSSSHRYSGVPSRFSGSGSGTEFTLTI |
| | | SSLQPEDFATYFCQQFKSYPLTFGQGTKLEIK |
| SEQ ID NO: 217 | VH | QVQLVQSGAEVKKPGSSVKVSCKASGYSFTTYYIH |
| | | WVRQAPGQGLEWMGRIFPGSGNIKYNEKFKGRVTI |
| | | TADTSTSTAYMELSSLRSEDTAVYYCAGSYYSYDVL |
| | | DYWGQGTTVTVSS |

A-H.51

| | | |
|---|---|---|
| SEQ ID NO: 218 | VH + VL | QVQLVQSGAEVKKPGSSVKVSCKASGYSFTTYYIH |
| | | WVRQAPGQGLEWMGWFFPGSGNIKYNEKFKGRVTI |
| | | TADTSTSTAYMELSSLRSEDTAVYYCAGSIYSAGVL |
| | | DYWGQGTTVTVSSGGGGSGGGGSGGGGSGGGGSDI |
| | | QMTQSPSFLSASVGDRVTITCKASQNVGINVVWHQ |
| | | QKPGKAPKALIYSSSHRYSGVPSRFSGSGSGTEFTLTI |
| | | SSLQPEDFATYFCQQFKSYPLTFGQGTKLEIK |
| SEQ ID NO: 219 | VH | QVQLVQSGAEVKKPGSSVKVSCKASGYSFTTYYIH |
| | | WVRQAPGQGLEWMGWFFPGSGNIKYNEKFKGRVTI |
| | | TADTSTSTAYMELSSLRSEDTAVYYCAGSIYSAGVL |
| | | DYWGQGTTVTVSS |

A-H.52

| | | |
|---|---|---|
| SEQ ID NO: 220 | VH + VL | QVQLVQSGAEVKKPGSSVKVSCKASGYSFTTYYIH |
| | | WVRQAPGQGLEWMGWFFPGSGNIKYNEKFKGRVTI |
| | | TADTSTSTAYMELSSLRSEDTAVYYCAGSYYSYDVL |
| | | DYWGQGTTVTVSSGGGGSGGGGSGGGGSGGGGSDI |
| | | QMTQSPSFLSASVGDRVTITCKASQNVGINVVWHQ |
| | | QKPGKAPKALIYSSSHRYSGVPSRFSGSGSGTEFTLTI |
| | | SSLQPEDFATYFCQQFKSYPLTFGQGTKLEIK |
| SEQ ID NO: 221 | VH | QVQLVQSGAEVKKPGSSVKVSCKASGYSFTLGYIH |
| | | WVRQAPGQGLEWMGWFFPGSGNIKYNEKFKGRVTI |
| | | TADTSTSTAYMELSSLRSEDTAVYYCAGSYYSYDVL |
| | | DYWGQGTTVTVSS |

A-H.53

| | | |
|---|---|---|
| SEQ ID NO: 222 | VH + VL | QVQLVQSGAEVKKPGSSVKVSCKASGYSFTTYYIH |
| | | WVRQAPGQGLEWMGWFFPGSGNIKYNEKFKGRVTI |
| | | TADTSTSTAYMELSSLRSEDTAVYYCAGSYYSYDVL |
| | | DYWGQGTTVTVSSGGGGSGGGGSGGGGSGGGGSDI |
| | | QMTQSPSFLSASVGDRVTITCKASQNVGINVVWHQ |
| | | QKPGKAPKALIYSSSHRYSGVPSRFSGSGSGTEFTLTI |
| | | SSLQPEDFATYFCQQFKSYPLTFGQGTKLEIK |
| SEQ ID NO: 223 | VH | QVQLVQSGAEVKKPGSSVKVSCKASGYSFRLTYIH |
| | | WVRQAPGQGLEWMGWFFPGSGNIKYNEKFKGRVTI |
| | | TADTSTSTAYMELSSLRSEDTAVYYCAGSYYSYDVL |
| | | DYWGQGTTVTVSS |

A-H.54

| | | |
|---|---|---|
| SEQ ID NO: 224 | VH + VL | QVQLVQSGAEVKKPGSSVKVSCKASGYSFTTYYIH |
| | | WVRQAPGQGLEWMGWFFPGSGNIKYNEKFKGRVTI |
| | | TADTSTSTAYMELSSLRSEDTAVYYCAGSYYSYDVL |
| | | DYWGQGTTVTVSSGGGGSGGGGSGGGGSGGGGSDI |
| | | QMTQSPSFLSASVGDRVTITCKASQNVGINVVWHQ |
| | | QKPGKAPKALIYSSSHRYSGVPSRFSGSGSGTEFTLTI |
| | | SSLQPEDFATYFCQQFKSYPLTFGQGTKLEIK |
| SEQ ID NO: 225 | VH | QVQLVQSGAEVKKPGSSVKVSCKASGYSFTTYYIH |
| | | WVRQAPGQGLEWMGWFFPGSGNIKYNEKFKGRVTI |
| | | TADTSTSTAYMELSSLRSEDTAVYYCAGSYYSYDVL |
| | | DYWGQGTTVTVSS |

A-H.55 antibody

| | | |
|---|---|---|
| SEQ ID NO: 3 | HC CDR1 (Combined) | GYSFTTYYIH |
| SEQ ID NO: 4 | HC CDR2 (Combined) | WFFPGSGNIKYNEKFKG |
| SEQ ID NO: 5 | HC CDR3 (Combined) | SYYSYDVLDY |
| SEQ ID NO: 45 | HC CDR1 (Kabat) | TYYIH |
| SEQ ID NO: 46 | HC CDR2 (Kabat) | WFFPGSGNIKYNEKFKG |
| SEQ ID NO: 47 | HC CDR3 (Kabat) | SYYSYDVLDY |
| SEQ ID NO: 48 | HC CDR1 (Chothia) | GYSFTTY |
| SEQ ID NO: 49 | HC CDR2 (Chothia) | FPGSGN |
| SEQ ID NO: 50 | HC CDR3 (Chothia) | SYYSYDVLDY |
| SEQ ID NO: | VH | QVQLVQSGAEVKKPGSSVKVSCKASGYSFTTYYIH |
| 1100 | | WVRQAPGQGLEWMGWFFPGSGNIKYNEKFKGRVTI |
| | | TADTSTSTAYMELSSLRSEDTAVYYCAGSYYSYDVL |
| | | DYWGQGTTVTVSS |
| SEQ ID NO: 6 | LC CDR1 (Combined) | KASQNVGINVV |
| SEQ ID NO: 7 | LC CDR2 (Combined) | SSSHRYS |
| SEQ ID NO: 8 | LC CDR3 (Combined) | QQFKSYPLT |
| SEQ ID NO: 51 | LC CDR1 (Kabat) | KASQNVGINVV |
| SEQ ID NO: 52 | LC CDR2 (Kabat) | SSSHRYS |
| SEQ ID NO: 53 | LC CDR3 (Kabat) | QQFKSYPLT |
| SEQ ID NO: 54 | LC CDR1 (Chothia) | KASQNVGINVV |
| SEQ ID NO: 55 | LC CDR2 (chothia) | SSSHRYS |
| SEQ ID NO: 56 | LC CDR3 (chothia) | QQFKSYPLT |
| SEQ ID NO: | VL | QSVLTQPPSVSEAPRQRVTISCKASQNVGINVVWHQ |
| 1101 | | QLPGKAPKALIYSSSHRYSGVSDRFSGSGSGTSFSLAI |
| | | SGLQSEDEADYFCQQFKSYPLTFGTGTKVTVL |

A-H.56

| | | |
|---|---|---|
| SEQ ID NO: | VH + VL (ScFv) | QVQLVQSGAEVKKPGSSVKVSCKASGHDFDKFYIH |
| 1309 | | WVRQAPGQGLEWMGRVSAGSGNVKYNEKFKGRV |
| | | TITADTSTSTAYMELSSLRSEDTAVYYCAGSYYSYD |
| | | VLDYWGQGTTVTVSSGGGGSGGGGSGGGGSGGGG |
| | | SDIQMTQSPSFLSASVGDRVTITCKASQNVGNRVAW |
| | | YQQKPGKAPKALIYSSSHRYKGVPSRFSGSGSGTEFT |
| | | LTISSLQPEDFATYFCQQFKSYPLTFGQGTKLEIK |

A-H.57

| | | |
|---|---|---|
| SEQ ID NO: | VH + VL (ScFv) | QVQLVQSGAEVKKPGSSVKVSCKASGHDFRLTYIH |
| 1326 | | WVRQAPGQGLEWMGRVSAGSGNTKYNEKFKGRVT |
| | | ITADTSTSTAYMELSSLRSEDTAVYYCAVSYYSYDV |
| | | LDYWGQGTTVTVSSGGGGSGGGGSGGGGSGGGGS |
| | | DIQMTQSPSFLSASVGDRVTITCKASQNVGDRVVW |
| | | HQQKPGKAPKALIYSSSHRYKGVPSRFSGSGSGTEFT |
| | | LTISSLQPEDFATYFCQQFKSYPLTFGQGTKLEIK |

A-H.58

| | | |
|---|---|---|
| SEQ ID NO: | VH + VL (ScFv) | QVQLVQSGAEVKKPGSSVKVSCKASGHDFRLTYIH |
| 1327 | | WVRQAPGQGLEWMGRVSAGSGNVKYNEKFKGRV |
| | | TITADTSTSTAYMELSSLRSEDTAVYYCAVSYYSYD |
| | | VLDYWGQGTTVTVSSGGGGSGGGGSGGGGSGGGG |
| | | SDIQMTQSPSFLSASVGDRVTITCKASQNVGNRVVW |
| | | HQQKPGKAPKALIYSSSHRYKGVPSRFSGSGSGTEFT |
| | | LTISSLQPEDFATYFCQQFKSYPLTFGQGTKLEIK |

A-H.59

| | | |
|---|---|---|
| SEQ ID NO: | VH + VL (ScFv) | QVQLVQSGAEVKKPGSSVKVSCKASGHDFRLTYIH |
| 1328 | | WVRQAPGQGLEWMGRIYAGSGNVKYNEKFKGRVT |
| | | ITADTSTSTAYMELSSLRSEDTAVYYCAVSYYSYDV |
| | | LDYWGQGTTVTVSSGGGGSGGGGSGGGGSGGGGS |
| | | DIQMTQSPSFLSASVGDRVTITCKASQNVADRVVW |
| | | HQQKPGKAPKALIYSSSHRYKGVPSRFSGSGSGTEFT |
| | | LTISSLQPEDFATYFCQQFKSYPLTFGQGTKLEIK |

A-H.60

| | | |
|---|---|---|
| SEQ ID NO: | VH + VL (ScFv) | QVQLVQSGAEVKKPGSSVKVSCKASGHDFKLTYIH |
| 1329 | | WVRQAPGQGLEWMGRVSAGSGNTKYNEKFKGRVT |
| | | ITADTSTSTAYMELSSLRSEDTAVYYCAVSYYSYDV |
| | | LDYWGQGTTVTVSSGGGGSGGGGSGGGGSGGGGS |
| | | DIQMTQSPSFLSASVGDRVTITCKASQNVGDRVAW |
| | | HQQKPGKAPKALIYSSSHRYKGVPSRFSGSGSGTEFT |
| | | LTISSLQPEDFATYFCQQFKSYPLTFGQGTKLEIK |

A-H.61

| | | |
|---|---|---|
| SEQ ID NO: | VH + VL (ScFv) | QVQLVQSGAEVKKPGSSVKVSCKASGHDFKLTYIH |
| 1330 | | WVRQAPGQGLEWMGRVSAGSGNTKYNEKFKGRVT |
| | | ITADTSTSTAYMELSSLRSEDTAVYYCAVSYYSYDV |
| | | LDYWGQGTTVTVSSGGGGSGGGGSGGGGSGGGGS |
| | | DIQMTQSPSFLSASVGDRVTITCKASQNVDNRVAW |
| | | HQQKPGKAPKALIYSSSHRYKGVPSRFSGSGSGTEFT |
| | | LTISSLQPEDFATYFCQQFKSYPLTFGQGTKLEIK |

A-H.62

| | | |
|---|---|---|
| SEQ ID NO: | VH + VL (ScFv) | QVQLVQSGAEVKKPGSSVKVSCKASGHDFRLTYIH |
| 1331 | | WVRQAPGQGLEWMGRVSAGSGNVKYNEKFKGRV |
| | | TITADTSTSTAYMELSSLRSEDTAVYYCAVSYYSYD |
| | | VLDYWGQGTTVTVSSGGGGSGGGGSGGGGSGGGG |
| | | SDIQMTQSPSFLSASVGDRVTITCKASQNVADRVVW |
| | | HQQKPGKAPKALIYSSSHRYKGVPSRFSGSGSGTEFT |
| | | LTISSLQPEDFATYFCQQFKSYPLTFGQGTKLEIK |

A-H.63

| | | |
|---|---|---|
| SEQ ID NO: | VH + VL (ScFv) | QVQLVQSGAEVKKPGSSVKVSCKASGHDFRLTYIH |
| 1332 | | WVRQAPGQGLEWMGRVYAGSGNTKYNEKFKGRV |
| | | TITADTSTSTAYMELSSLRSEDTAVYYCAVSYYSYD |
| | | VLDYWGQGTTVTVSSGGGGSGGGGSGGGGSGGGG |
| | | SDIQMTQSPSFLSASVGDRVTITCKASQNVEDRVVW |
| | | HQQKPGKAPKALIYSSSHRYKGVPSRFSGSGSGTEFT |
| | | LTISSLQPEDFATYFCQQFKSYPLTFGQGTKLEIK |

A-H.64

| | | |
|---|---|---|
| SEQ ID NO: | VH + VL (ScFv) | QVQLVQSGAEVKKPGSSVKVSCKASGHDFKLTYIH |
| 1333 | | WVRQAPGQGLEWMGRVSAGSGNTKYNEKFKGRVT |
| | | ITADTSTSTAYMELSSLRSEDTAVYYCAVSYYSYDV |
| | | LDYWGQGTTVTVSSGGGGSGGGGSGGGGSGGGGS |
| | | DIQMTQSPSFLSASVGDRVTITCKASQNVADRVVW |
| | | HQQKPGKAPKALIYSSSHRYKGVPSRFSGSGSGTEFT |
| | | LTISSLQPEDFATYFCQQFKSYPLTFGQGTKLEIK |

A-H.65

| | | |
|---|---|---|
| SEQ ID NO: | VH + VL (ScFv) | QVQLVQSGAEVKKPGSSVKVSCKASGHDFKLTYIH |
| 1334 | | WVRQAPGQGLEWMGRISAGSGNTKYNEKFKGRVTI |
| | | TADTSTSTAYMELSSLRSEDTAVYYCAVSYYSYDVL |
| | | DYWGQGTTVTVSSGGGGSGGGGSGGGGSGGGGSDI |
| | | QMTQSPSFLSASVGDRVTITCKASQNVGDRVVWHQ |
| | | QKPGKAPKALIYSSSHRYKGVPSRFSGSGSGTEFTLT |
| | | ISSLQPEDFATYFCQQFKSYPLTFGQGTKLEIK |

A-H.66

| | | |
|---|---|---|
| SEQ ID NO: | VH + VL (ScFv) | QVQLVQSGAEVKKPGSSVKVSCKASGHDFKLTYIH |
| 1335 | | WVRQAPGQGLEWMGRIYAGSGNTKYNEKFKGRVT |
| | | ITADTSTSTAYMELSSLRSEDTAVYYCAVSYYSYDV |
| | | LDYWGQGTTVTVSSGGGGSGGGGSGGGGSGGGGS |
| | | DIQMTQSPSFLSASVGDRVTITCKASQNVGDRVVW |
| | | HQQKPGKAPKALIYSSSHRYKGVPSRFSGSGSGTEFT |
| | | LTISSLQPEDFATYFCQQFKSYPLTFGQGTKLEIK |

A-H.67

| | | |
|---|---|---|
| SEQ ID NO: | VH + VL (ScFv) | QVQLVQSGAEVKKPGSSVKVSCKASGTDFKLTYIH |
| 1336 | | WVRQAPGQGLEWMGRIFPGSGNVKYNEKFKGRVTI |
| | | TADTSTSTAYMELSSLRSEDTAVYYCAVSYYSYDVL |
| | | DYWGQGTTVTVSSGGGGSGGGGSGGGGSGGGGSDI |
| | | QMTQSPSFLSASVGDRVTITCKASQNVDNRVAWYQ |
| | | QKPGKAPKALIYSSSHRYKGVPSRFSGSGSGTEFTLT |
| | | ISSLQPEDFATYFCQQFKSYPLTFGQGTKLEIK |

A-H.68

| | | |
|---|---|---|
| SEQ ID NO: | VH + VL (ScFv) | QVQLVQSGAEVKKPGSSVKVSCKASGHDFRLTYIH |
| 1337 | | WVRQAPGQGLEWMGRISAGSGNVKYNEKFKGRVT |
| | | ITADTSTSTAYMELSSLRSEDTAVYYCAVSYYSYDV |
| | | LDYWGQGTTVTVSSGGGGSGGGGSGGGGSGGGGS |
| | | DIQMTQSPSFLSASVGDRVTITCKASQNVADRVAW |
| | | YQQKPGKAPKALIYSSSHRYKGVPSRFSGSGSGTEFT |
| | | LTISSLQPEDFATYFCQQFKSYPLTFGQGTKLEIK |

A-H.69 (also referred to as A-H.13)

| | | |
|---|---|---|
| SEQ ID NO: 110 | VH + VL (ScFv) | QVQLVQSGAEVKKPGSSVKVSCKASGTDFKLTYIH |
| | | WVRQAPGQGLEWMGRIFPGSGNVKYNEKFKGRVTI |
| | | TADTSTSTAYMELSSLRSEDTAVYYCAGSYYSYDVL |
| | | DYWGQGTTVTVSSGGGGSGGGGSGGGGSGGGGSDI |
| | | QMTQSPSFLSASVGDRVTITCKASQNVDNRVAWYQ |
| | | QKPGKAPKALIYSSSHRYKGVPSRFSGSGSGTEFTLT |
| | | ISSLQPEDFATYFCQQFKSYPLTFGQGTKLEIK |

A-H humanized-matured VH

| | | |
|---|---|---|
| SEQ ID NO: | VH-humanized matured | QVQLVQSGAEVKKPGSSVKVSCKASGTDFKLTYIH |
| 1310 | 1 | WVRQAPGQGLEWMGRIFPGSGNVKYNEKFKGRVTI |
| | | TADTSTSTAYMELSSLRSEDTAVYYCAGSYYSYDVL |
| | | DYWGQGTTVTVSS |
| SEQ ID NO: | VH-humanized matured | QVQLVQSGAEVKKPGSSVKVSCKASGTDFKLTYIH |
| 1311 | 2 | WVRQAPGQGLEWMGRIFPGSGNVKYNEKFKGRVTI |
| | | TADTSTSTAYMELSSLRSEDTAVYYCAVSYYSYDVL |
| | | DYWGQGTTVTVSS |
| SEQ ID NO: | VH-humanized matured | QVQLVQSGAEVKKPGSSVKVSCKASGHDFRLTYIH |
| 1312 | 3 | WVRQAPGQGLEWMGRISAGSGNVKYNEKFKGRVT |
| | | ITADTSTSTAYMELSSLRSEDTAVYYCAVSYYSYDV |
| | | LDYWGQGTTVTVSS |

A-H humanized-matured VL

| | | |
|---|---|---|
| SEQ ID NO: | VL-humanized matured | DIQMTQSPSFLSASVGDRVTITCKASQNVDNRVAW |
| 1313 | 1 | YQQKPGKAPKALIYSSSHRYKGVPSRFSGSGSGTEFT |
| | | LTISSLQPEDFATYFCQQFKSYPLTFGQGTKLEIK |
| SEQ ID NO: | VL-humanized matured | DIQMTQSPSFLSASVGDRVTITCKASQNVADRVAW |
| 1314 | 2 | YQQKPGKAPKALIYSSSHRYKGVPSRFSGSGSGTEFT |
| | | LTISSLQPEDFATYFCQQFKSYPLTFGQGTKLEIK |

A-H.70

| | | |
|---|---|---|
| SEQ ID NO: 1346 | VH | QVQLVQSGAEVKKPGSSVK |
| | (CDRs underlined) | VSCKASGHDFRLTYIHWVR |
| | | QAPGQGLEWMGRVSAGSGN |
| | | VKYNEKFKGRVTITADTSTS |
| | | TAYMELSSLRSEDTAVYYCA |
| | | VSYYSYDVLDYWGQGTTVT |
| | | VSS |
| SEQ ID NO: 1347 | VL | DIQMTQSPSFLSASVGDRVTI |
| | (CDRs underlined) | TCKASQNVGNRVVWHQQR |
| | | PGKAPKALIYSSSHRYKGVP |
| | | SRFSGSGSGTEFTLTISSLQPE |
| | | DFATYFCQQFKSYPLTFGQG |
| | | TKLEIK |

A-H.71

| | | |
|---|---|---|
| SEQ ID NO: 1348 | VH | QVQLVQSGAEVKKPGSSVK |
| | (CDRs underlined) | VSCKASGHDFRLTYIHWVR |
| | | QAPGQGLEWMGRIYAGSGN |
| | | VKYNEKFKGRVTITADTSTS |
| | | TAYMELSSLRSEDTAVYYCA |
| | | VSYYSYDVLDYWGQGTTVT |
| | | VSS |
| SEQ ID NO: 1349 | VL | DIQMTQSPSFLSASVGDRVTI |
| | (CDRs underlined) | TCKASQNVADRVVWHQQK |
| | | PGKAPKALIYSSSHRYKGVP |
| | | SRFSGSGSGTEFTLTISSLQPE |
| | | DFATYFCQQFRSYPLTFGQG |
| | | TKLEIK |

A-H.72

| | | |
|---|---|---|
| SEQ ID NO: 1350 | VH | QVQLVQSGAEVKKPGSSVK |
| | (CDRs underlined) | VSCKASGHDFRLTYIHWVR |
| | | QAPGQGLEWMGRVSAGSGN |
| | | TKYNEKFKGRVTITADTSTS |
| | | TAYMELSSLRSEDTAVYYCA |
| | | VSYYSYDVLDYWGQGTTVT |
| | | VSS |
| SEQ ID NO: 1351 | VL | DIQMTQSPSFLSASVGDRVTI |
| | (CDRs underlined) | TCKASQNVGDRVAWHQQK |
| | | PGKAPKALIYSSSHRYKGVP |
| | | SRFSGSGSGTEFTLTISSLQPE |
| | | DFATYFCQQFRSYPLTFGQG |
| | | TKLEIK |

A-H.73

| | | |
|---|---|---|
| SEQ ID NO: 1350 | VH | QVQLVQSGAEVKKPGSSVK |
| | (CDRs underlined) | VSCKASGHDFRLTYIHWVR |
| | | QAPGQGLEWMGRVSAGSGN |
| | | TKYNEKFKGRVTITADTSTS |
| | | TAYMELSSLRSEDTAVYYCA |
| | | VSYYSYDVLDYWGQGTTVT |
| | | VSS |
| SEQ ID NO: 1353 | VL | DIQMTQSPSFLSASVGDRVTI |
| | (CDRs underlined) | TCKASQNVDNRVAWHQQK |
| | | PGKAPKALIYSSSHRYKGVP |
| | | SRFSGSGSGTEFTLTISSLQPE |
| | | DFATYFCQQFKSYPLTFGQG |
| | | TKLEIK |

A-H.74

| | | |
|---|---|---|
| SEQ ID NO: 1346 | VH | QVQLVQSGAEVKKPGSSVK |
| | (CDRs underlined) | VSCKASGHDFRLTYIHWVR |
| | | QAPGQGLEWMGRVSAGSGN |
| | | VKYNEKFKGRVTITADTSTS |
| | | TAYMELSSLRSEDTAVYYCA |
| | | VSYYSYDVLDYWGQGTTVT |
| | | VSS |
| SEQ ID NO: 1349 | VL | DIQMTQSPSFLSASVGDRVTI |
| | (CDRs underlined) | TCKASQNVADRVVWHQQK |
| | | PGKAPKALIYSSSHRYKGVP |
| | | SRFSGSGSGTEFTLTISSLQPE |
| | | DFATYFCQQFKSYPLTFGQG |
| | | TKLEIK |

A-H.75

| | | |
|---|---|---|
| SEQ ID NO: 1356 | VH | QVQLVQSGAEVKKPGSSVK |
| | (CDRs underlined) | VSCKASGHDFRLTYIHWVR |
| | | QAPGQGLEWMGRVYAGSG |
| | | NTKYNEKFKGRVTITADTST |
| | | STAYMELSSLRSEDTAVYYC |
| | | AVSYYSYDVLDYWGQGTTV |
| | | TVSS |
| SEQ ID NO: 1357 | VL | DIQMTQSPSFLSASVGDRVTI |
| | (CDRs underlined) | TCKASQNVEDRVVWHQQKP |
| | | GKAPKALIYSSSHRYKGVPS |
| | | RFSGSGSGTEFTLTISSLQPED |
| | | FATYFCQQFKSYPLTFGQGT |
| | | KLEIK |

A-H.76

| | | |
|---|---|---|
| SEQ ID NO: 1350 | VH | QVQLVQSGAEVKKPGSSVK |
| | (CDRs underlined) | VSCKASGHDFRLTYIHWVR |
| | | QAPGQGLEWMGRVSAGSGN |
| | | TKYNEKFKGRVTITADTSTS |
| | | TAYMELSSLRSEDTAVYYCA |
| | | VSYYSYDVLDYWGQGTTVT |
| | | VSS |
| SEQ ID NO: 1349 | VL | DIQMTQSPSFLSASVGDRVTI |
| | (CDRs underlined) | TCKASQNVADRVVWHQQK |
| | | PGKAPKALIYSSSHRYKGVP |
| | | SRFSGSGSGTEFTLTISSLQPE |
| | | DFATYFCQQFKSYPLTFGQG |
| | | TKLEIK |

A-H.77

| | | |
|---|---|---|
| SEQ ID NO: 1360 | VH | QVQLVQSGAEVKKPGSSVK |
| | (CDRs underlined) | VSCKASGHDFKLTYIHWVR |
| | | QAPGQGLEWMGRISAGSGN |
| | | TKYNEKFKGRVTITADTSTS |
| | | TAYMELSSLRSEDTAVYYCA |
| | | VSYYSYDVLDYWGQGTTVT |
| | | VSS |
| SEQ ID NO: 1361 | VL | DIQMTQSPSFLSASVGDRVTI |
| | (CDRs underlined) | TCKASQNVGDRVVWHQQK |
| | | PGKAPKALIYSSSHRYKGVP |
| | | SRFSGSGSGTEFTLTISSLQPE |
| | | DFATYFCQQFKSYPLTFGQG |
| | | TKLEIK |

A-H.78

| | | |
|---|---|---|
| SEQ ID NO: 1362 | VH | QVQLVQSGAEVKKPGSSVK |
| | (CDRs underlined) | VSCKASGHDFKLTYIHWVR |
| | | QAPGQGLEWMGRIYAGSGN |
| | | TKYNEKFKGRVTITADTSTS |
| | | TAYMELSSLRSEDTAVYYCA |
| | | VSYYSYDVLDYWGQGTTVT |
| | | VSS |
| SEQ ID NO: 1361 | VL | DIQMTQSPSFLSASVGDRVTI |
| | (CDRs underlined) | TCKASQNVGDRVVWHQQK |
| | | PGKAPKALIYSSSHRYKGVP |
| | | SRFSGSGSGTEFTLTISSLQPE |
| | | DFATYFCQQFKSYPLTFGQG |
| | | TKLEIK |

A-H.79

| | | |
|---|---|---|
| SEQ ID NO: 1350 | VH | QVQLVQSGAEVKKPGSSVK |
| | (CDRs underlined) | VSCKASGHDFKLTYIHWVR |
| | | QAPGQGLEWMGRVSAGSGN |
| | | TKYNEKFKGRVTITADTSTS |
| | | TAYMELSSLRSEDTAVYYCA |
| | | VSYYSYDVLDYWGQGTTVT |
| | | VSS |
| SEQ ID NO: 1365 | VL | DIQMTQSPSFLSASVGDRVTI |
| | (CDRs underlined) | TCRASQNVDNRLGWHQQKP |
| | | GKAPKALIYSSSHRYKGVPS |
| | | RFSGSGSGTEFTLTISSLQPED |
| | | FATYFCQQFKSYPLTFGQGT |
| | | KLEIK |

A-H.80

| | | |
|---|---|---|
| SEQ ID NO: 1350 | VH | QVQLVQSGAEVKKPGSSVK |
| | (CDRs underlined) | VSCKASGHDFKLTYIHWVR |
| | | QAPGQGLEWMGRVSAGSGN |
| | | TKYNEKFKGRVTITADTSTS |
| | | TAYMELSSLRSEDTAVYYCA |
| | | VSYYSYDVLDYWGQGTTVT |
| | | VSS |
| SEQ ID NO: 1367 | VL | DIQMTQSPSFLSASVGDRVTI |
| | (CDRs underlined) | TCKASQNVDNRVAWHQQK |
| | | PGKAPKALIYAASSLQKGVP |
| | | SRFSGSGSGTEFTLTISSLQPE |
| | | DFATYFCQQFKSYPLTFGQG |
| | | TKLEIK |

A-H.81

| | | |
|---|---|---|
| SEQ ID NO: 1350 | VH | QVQLVQSGAEVKKPGSSVK |
| | (CDRs underlined) | VSCKASGHDFKLTYIHWVR |
| | | QAPGQGLEWMGRVSAGSGN |
| | | TKYNEKFKGRVTITADTSTS |
| | | TAYMELSSLRSEDTAVYYCA |
| | | VSYYSYDVLDYWGQGTTVT |
| | | VSS |
| SEQ ID NO: 1369 | VL | DIQMTQSPSFLSASVGDRVTI |
| | (CDRs underlined) | TCKASQNVDNRVAWHQQK |
| | | PGKAPKALIYSSSHRYKGVP |
| | | SRFSGSGSGTEFTLTISSLQPE |
| | | DFATYFCLQHNSYPLTFGQG |
| | | TKLEIK |

A-H.82

| | | |
|---|---|---|
| SEQ ID NO: 1370 | VH | QVQLVQSGAEVKKPGSSVK |
| | (CDRs underlined) | VSCKASGHDFKLTYIHWVR |
| | | QAPGQGLEWMGRVSAGSGN |
| | | VNYAQKFQGRVTITADTSTS |
| | | TAYMELSSLRSEDTAVYYCA |
| | | VSYYSYDVLDYWGQGTTVT |
| | | VSS |
| SEQ ID NO: 1365 | VL | DIQMTQSPSFLSASVGDRVTI |
| | (CDRs underlined) | TCRASQNVDNRLGWHQQKP |
| | | GKAPKALIYSSSHRYKGVPS |
| | | RFSGSGSGTEFTLTISSLQPED |
| | | FATYFCQQFKSYPLTFGQGT |
| | | KLEIK |

A-H.83

| | | |
|---|---|---|
| SEQ ID NO: 1370 | VH | QVQLVQSGAEVKKPGSSVK |
| | (CDRs underlined) | VSCKASGHDFKLTYIHWVR |
| | | QAPGQGLEWMGRVSAGSGN |
| | | VNYAQKFQGRVTITADTSTS |
| | | TAYMELSSLRSEDTAVYYCA |
| | | VSYYSYDVLDYWGQGTTVT |
| | | VSS |
| SEQ ID NO: 1367 | VL | DIQMTQSPSFLSASVGDRVTI |
| | (CDRs underlined) | TCKASQNVDNRVAWHQQK |
| | | PGKAPKALIYAASSLQKGVP |
| | | SRFSGSGSGTEFTLTISSLQPE |
| | | DFATYFCQQFKSYPLTFGQG |
| | | TKLEIK |

A-H.84

| | | |
|---|---|---|
| SEQ ID NO: 1370 | VH | QVQLVQSGAEVKKPGSSVK |
| | (CDRs underlined) | VSCKASGHDFKLTYIHWVR |
| | | QAPGQGLEWMGRVSAGSGN |
| | | VNYAQKFQGRVTITADTSTS |
| | | TAYMELSSLRSEDTAVYYCA |
| | | VSYYSYDVLDYWGQGTTVT |
| | | VSS |
| SEQ ID NO: 1369 | VL | DIQMTQSPSFLSASVGDRVTI |
| | (CDRs underlined) | TCKASQNVDNRVAWHQQK |
| | | PGKAPKALIYSSSHRYKGVP |
| | | SRFSGSGSGTEFTLTISSLQPE |
| | | DFATYFCLQHNSYPLTFGQG |
| | | TKLEIK |

A-H.85

| | | |
|---|---|---|
| SEQ ID NO: 1344 | VH (CDRs underlined) | QVQLVQSGAEVKKPGSSVK |
| | | VSCKASGHDFRLTYIHWVR |
| | | QAPGQGLEWMGRVSAGSGN |
| | | TKYNEKFKGRVTITADTSTS |
| | | TAYMELSSLRSEDTAVYYCA |
| | | VSYYSYDVLDYWGQGTTVT |
| | | VSS |
| SEQ ID NO: 1361 | VL | DIQMTQSPSFLSASVGDRVTI |
| | (CDRs underlined) | TCKASQNVGDRVVWHQQK |
| | | PGKAPKALIYSSSHRYKGVP |
| | | SRFSGSGSGTEFTLTISSLQPE |
| | | DFATYFCQQFKSYPLTFGQG |
| | | TKLEIK |

[0664] In some embodiments, the anti-TCRβV antibody molecule, e.g., anti-TCRβ V6 (e.g., anti-TCRβ V6-5*01) antibody molecule comprises a VH and/or a VL of an antibody described in Table 1, or a sequence with at least 80%, 85%, 90%, 95%, 96%, 97%, 98%, 99% or more identity thereto.

[0665] In some embodiments, the anti-TCRβV antibody molecule, e.g., anti-TCRβ V6 (e.g., anti-TCRβ V6-5*01) antibody molecule comprises a VH and a VL of an antibody described in Table 1, or a sequence with at least 80%, 85%, 90%, 95%, 96%, 97%, 98%, 99% or more identity thereto.

[0666] In some embodiments, an anti-TCRVb antibody disclosed herein has an antigen binding domain having a VL having a consensus sequence of SEQ ID NO: 230, wherein position 30 is G, E, A or D; position 31 is N or D; position 32 is R or K; position 36 is Y or H; and/or position 56 is K or S.

[0667] In some embodiments, an anti-TCRVb antibody disclosed herein has an antigen binding domain having a VH having a consensus sequence of SEQ ID NO: 231, wherein: position 27 is H or T or G or Y; position 28 is D or T or S; position 30 is H or R or D or K or T; position 31 is L or D or K or T or N; position 32 is W or F or T or I or Y or G; position 49 is R or W; position 50 is V or I or F; position 51 is F or S or Y; position 52 is A or P; position 56 is N or S; position 57 is T or V or Y or I; position 58 is K or R; position 97 is G or V; position 99 is Y or I; position 102 is Y or A; and/or position 103 is D or G.

### Anti-TCRβ V12 Antibodies

[0668] Accordingly, in one aspect, the disclosure provides an anti-TCRβV antibody molecule that binds to human TCRβ V12, e.g., a TCRβ V12 subfamily comprising: TCRβ V12-4*01, TCRβ V12-3*01 or TCRβ V12-5*01. In some embodiments the TCRβ V12 subfamily comprises TCRβ V12-4*01. In some embodiments the TCRβ V12 subfamily comprises TCRβ V12-3*01.

[0669] In some embodiments, the anti-TCRβV antibody molecule, e.g., anti-TCRβ V12 antibody molecule, is a non-murine antibody molecule, e.g., a human or humanized antibody molecule. In some embodiments, the anti-TCRβV antibody molecule, e.g., anti-TCRβ V12 antibody molecule is a human antibody molecule. In some embodiments, the anti-TCRβV antibody molecule, e.g., anti-TCRβ V12 antibody molecule is a humanized antibody molecule.

[0670] In some embodiments, the anti-TCRβV antibody molecule, e.g., anti-TCRβ V12 antibody molecule, is isolated or recombinant.

[0671] In some embodiments, the anti-TCRβV antibody molecule, e.g., anti-TCRβ V12 antibody molecule, comprises at least one antigen-binding region, e.g., a variable region or an antigen-binding fragment thereof, from an antibody described herein, e.g., an antibody described in Table 2, or encoded by a nucleotide sequence in Table 2, or a sequence substantially identical (e.g., at least 80%, 85%, 90%, 92%, 95%, 97%, 98%, 99% or higher identical) to any of the aforesaid sequences.

[0672] In some embodiments, the anti-TCRβV antibody molecule, e.g., anti-TCRβ V12 antibody molecule, comprises at least one, two, three or four variable regions from an antibody described herein, e.g., an antibody as described in Table 2, or encoded by a nucleotide sequence in Table 2, or a sequence substantially identical (e.g., at least 80%, 85%, 90%, 92%, 95%, 97%, 98%, 99% or higher identical) to any of the aforesaid sequences.

[0673] In some embodiments, the anti-TCRβV antibody molecule, e.g., anti-TCRβ V12 antibody molecule, comprises at least one or two heavy chain variable regions from an antibody described herein, e.g., an antibody as described in Table 2, or encoded by a nucleotide sequence in Table 2, or a sequence substantially identical (e.g., at least 80%, 85%, 90%, 92%, 95%, 97%, 98%, 99% or higher identical) to any of the aforesaid sequences.

[0674] In some embodiments, the anti-TCRβV antibody molecule, e.g., anti-TCRβ V12 antibody molecule, comprises at least one or two light chain variable regions from an antibody described herein, e.g., an antibody as described in Table 2, or encoded by a nucleotide sequence in Table 2, or a sequence substantially identical (e.g., at least 80%, 85%, 90%, 92%, 95%, 97%, 98%, 99% or higher identical) to any of the aforesaid sequences.

[0675] In some embodiments, the anti-TCRβV antibody molecule, e.g., anti-TCRβ V12 antibody molecule, comprises a heavy chain constant region for an IgG4, e.g., a human IgG4. In still another embodiment, the anti-TCRβV antibody molecule, e.g., anti-TCRβ V12 antibody molecule, includes a heavy chain constant region for an IgG1, e.g., a human IgG1. In one embodiment, the heavy chain constant region comprises an amino sequence set forth in Table 3, or a sequence substantially identical (e.g., at least 80%, 85%, 90%, 92%, 95%, 97%, 98%, 99% or higher identical) thereto.

[0676] In some embodiments, the anti-TCRβV antibody molecule, e.g., anti-TCRβ V12 antibody molecule, includes a kappa light chain constant region, e.g., a human kappa light chain constant region. In one embodiment, the light chain constant region comprises an amino sequence set forth in Table 3, or a sequence substantially identical (e.g., at least 80%, 85%, 90%, 92%, 95%, 97%, 98%, 99% or higher identical) thereto.

[0677] In some embodiments, the anti-TCRβV antibody molecule, e.g., anti-TCRβ V12 antibody molecule, includes at least one, two, or three complementarity determining regions (CDRs) from a heavy chain variable region of an antibody described herein, e.g., an antibody as described in Table 2, or encoded by the nucleotide sequence in Table 2, or a sequence substantially identical (e.g., at least 80%, 85%, 90%, 92%, 95%, 97%, 98%, 99% or higher identical) to any of the aforesaid sequences.

[0678] In some embodiments, the anti-TCRβV antibody molecule, e.g., anti-TCRβ V12 antibody molecule, includes at least one, two, or three CDRs (or collectively all of the CDRs) from a heavy chain variable region comprising an amino acid sequence shown in Table 2, or encoded by a nucleotide sequence shown in Table 2. In one embodiment, one or more of the CDRs (or collectively all of the CDRs) have one, two, three, four, five, six or more changes, e.g., amino acid substitutions or deletions, relative to the amino acid sequence shown in Table 2, or encoded by a nucleotide sequence shown in Table 2.

[0679] In some embodiments, the anti-TCRβV antibody molecule, e.g., anti-TCRβ V12 antibody molecule, includes at least one, two, or three complementarity determining regions (CDRs) from a light chain variable region of an antibody described herein, e.g., an antibody as described in Table 2, or encoded by the nucleotide sequence in Table 2, or a sequence substantially identical (e.g., at least 80%, 85%, 90%, 92%, 95%, 97%, 98%, 99% or higher identical) to any of the aforesaid sequences.

[0680] In some embodiments, the anti-TCRβV antibody molecule, e.g., anti-TCRβ V12 antibody molecule, includes at least one, two, or three CDRs (or collectively all of the CDRs) from a light chain variable region comprising an amino acid sequence shown in Table 2, or encoded by a nucleotide sequence shown in Table 2. In one embodiment, one or more of the CDRs (or collectively all of the CDRs) have one, two, three, four, five, six or more changes, e.g., amino acid substitutions or deletions, relative to the amino acid sequence shown in Table 2, or encoded by a nucleotide sequence shown in Table 2.

[0681] In some embodiments, the anti-TCRβV antibody molecule, e.g., anti-TCRβ V12 antibody molecule, includes at least one, two, three, four, five or six CDRs (or collectively all of the CDRs) from a heavy and light chain variable region comprising an amino acid sequence shown in Table 2, or encoded by a nucleotide sequence shown in Table 2. In one embodiment, one or more of the CDRs (or collectively all of the CDRs) have one, two, three, four, five, six or more changes, e.g., amino acid substitutions or deletions, relative to the amino acid sequence shown in Table 2, or encoded by a nucleotide sequence shown in Table 2.

[0682] In some embodiments, the anti-TCRβV antibody molecule, e.g., anti-TCRβ V12 antibody molecule, molecule includes all six CDRs from an antibody described herein, e.g., an antibody as described in Table 2, or encoded by the nucleotide sequence in Table 2, or closely related CDRs, e.g., CDRs which are identical or which have at least one amino acid alteration, but not more than two, three or four alterations (e.g., substitutions, deletions, or insertions, e.g., conservative substitutions). In some embodiments, the anti-TCRβV antibody molecule, e.g., anti-TCRβ V12 antibody molecule, may include any CDR described herein.

[0683] In some embodiments, the anti-TCRβV antibody molecule, e.g., anti-TCRβ V12 antibody molecule includes at least one, two, or three CDRs according to Kabat et al. (e.g., at least one, two, or three CDRs according to the Kabat definition as set out in Table 2) from a heavy chain variable region of an antibody described herein, e.g., an antibody chosen as described in Table 2, or a sequence substantially identical (e.g., at least 80%, 85%, 90%, 92%, 95%, 97%, 98%, 99% or higher identical) to any of the aforesaid sequences; or which have at least one amino acid alteration, but not more than two, three or four alterations (e.g., substitutions, deletions, or insertions, e.g., conservative substitutions) relative to one, two, or three CDRs according to Kabat et al. shown in Table 2.

[0684] In some embodiments, the anti-TCRβV antibody molecule, e.g., anti-TCRβ V12 antibody molecule includes at least one, two, or three CDRs according to Kabat et al. (e.g., at least one, two, or three CDRs according to the Kabat definition as set out in Table 2) from a light chain variable region of an antibody described herein, e.g., an antibody as described in Table 2, or a sequence substantially identical (e.g., at least 80%, 85%, 90%, 92%, 95%, 97%, 98%, 99% or higher identical) to any of the aforesaid sequences; or which have at least one amino acid alteration, but not more than two, three or four alterations (e.g., substitutions, deletions, or insertions, e.g., conservative substitutions) relative to one, two, or three CDRs according to Kabat et al. shown in Table 2.

[0685] In some embodiments, the anti-TCRβV antibody molecule, e.g., anti-TCRβ V12 antibody molecule includes at least one, two, three, four, five, or six CDRs according to Kabat et al. (e.g., at least one, two, three, four, five, or six CDRs according to the Kabat definition as set out in Table 2) from the heavy and light chain variable regions of an antibody described herein, e.g., an antibody as described in Table 2, or encoded by the nucleotide sequence in Table 2; or a sequence substantially identical (e.g., at least 80%, 85%, 90%, 92%, 95%, 97%, 98%, 99% or higher identical) to any of the aforesaid sequences; or which have at least one amino acid alteration, but not more than two, three or four alterations (e.g., substitutions, deletions, or insertions, e.g., conservative substitutions) relative to one, two, three, four, five, or six CDRs according to Kabat et al. shown in Table 2.

[0686] In some embodiments, the anti-TCRβV antibody molecule, e.g., anti-TCRβ V12 antibody molecule includes all six CDRs according to Kabat et al. (e.g., all six CDRs according to the Kabat definition as set out in Table 2) from the heavy and light chain variable regions of an antibody described herein, e.g., an antibody as described in Table 2, or encoded by the nucleotide sequence in Table 2; or encoded by the nucleotide sequence in Table 2; or a sequence substantially identical (e.g., at least 80%, 85%, 90%, 92%, 95%, 97%, 98%, 99% or higher identical) to any of the aforesaid sequences; or which have at least one amino acid alteration, but not more than two, three or four alterations (e.g., substitutions, deletions, or insertions, e.g., conservative substitutions) relative to all six CDRs according to Kabat et al. shown in Table 2. In some embodiments, the anti-TCRβV antibody molecule, e.g., anti-TCRβ V12 antibody molecule may include any CDR described herein.

[0687] In some embodiments, the anti-TCRβV antibody molecule, e.g., anti-TCRβ V12 antibody molecule includes at least one, two, or three hypervariable loops that have the same canonical structures as the corresponding hypervariable loop of an antibody described herein, e.g., an antibody described in Table 2, e.g., the same canonical structures as at least loop 1 and/or loop 2 of the heavy and/or light chain variable domains of an antibody described herein. See, e.g., Chothia et al., (1992) J. Mol. Biol. 227:799-817; Tomlinson et al., (1992) J. Mol. Biol. 227:776-798 for descriptions of hypervariable loop canonical structures. These structures can be determined by inspection of the tables described in these references.

[0688] In some embodiments, the anti-TCRβV antibody molecule, e.g., anti-TCRβ V12 antibody molecule includes at least one, two, or three CDRs according to Chothia et al. (e.g., at least one, two, or three CDRs according to the Chothia definition as set out in Table 2) from a heavy chain variable region of an antibody described herein, e.g., an antibody chosen as described in Table 2, or a sequence substantially identical (e.g., at least 80%, 85%, 90%, 92%, 95%, 97%, 98%, 99% or higher identical) to any of the aforesaid sequences; or which have at least one amino acid alteration, but not more than two, three or four alterations (e.g., substitutions, deletions, or insertions, e.g., conservative substitutions) relative to one, two, or three CDRs according to Chothia et al. shown in Table 2.

[0689] In some embodiments, the anti-TCRβV antibody molecule, e.g., anti-TCRβ V12 antibody molecule includes at least one, two, or three CDRs according to Chothia et al. (e.g., at least one, two, or three CDRs according to the Chothia definition as set out in Table 2) from a light chain variable region of an antibody described herein, e.g., an antibody as described in Table 2, or a sequence substantially identical (e.g., at least 80%, 85%, 90%, 92%, 95%, 97%, 98%, 99% or higher identical) to any of the aforesaid sequences; or which have at least one amino acid alteration, but not more than two, three or four alterations (e.g., substitutions, deletions, or insertions, e.g., conservative substitutions) relative to one, two, or three CDRs according to Chothia et al. shown in Table 2.

[0690] In some embodiments, the anti-TCRβV antibody molecule, e.g., anti-TCRβ V12 antibody molecule includes at least one, two, three, four, five, or six CDRs according to Chothia et al. (e.g., at least one, two, three, four, five, or six CDRs according to the Chothia definition as set out in Table 2) from the heavy and light chain variable regions of an antibody described herein, e.g., an antibody as described in Table 2, or encoded by the nucleotide sequence in Table 2; or a sequence substantially identical (e.g., at least 80%, 85%, 90%, 92%, 95%, 97%, 98%, 99% or higher identical) to any of the aforesaid sequences; or which have at least one amino acid alteration, but not more than two, three or four alterations (e.g., substitutions, deletions, or insertions, e.g., conservative substitutions) relative to one, two, three, four, five, or six CDRs according to Chothia et al. shown in Table 2.

[0691] In some embodiments, the anti-TCRβV antibody molecule, e.g., anti-TCRβ V12 antibody molecule includes all six CDRs according to Chothia et al. (e.g., all six CDRs according to the Chothia definition as set out in Table 2) from the heavy and light chain variable regions of an antibody described herein, e.g., an antibody as described in Table 2, or encoded by the nucleotide sequence in Table 2; or encoded by the nucleotide sequence in Table 2; or a sequence substantially identical (e.g., at least 80%, 85%, 90%, 92%, 95%, 97%, 98%, 99% or higher identical) to any of the aforesaid sequences; or which have at least one amino acid alteration, but not more than two, three or four alterations (e.g., substitutions, deletions, or insertions, e.g., conservative substitutions) relative to all six CDRs according to Chothia et al. shown in Table 2. In some embodiments, the anti-TCRβV antibody molecule, e.g., anti-TCRβ V12 antibody molecule may include any CDR described herein.

[0692] In some embodiments, the anti-TCRβV antibody molecule, e.g., anti-TCRβ V12 antibody molecule includes at least one, two, or three CDRs according to a combined CDR (e.g., at least one, two, or three CDRs according to the combined CDR definition as set out in Table 2) from a heavy chain variable region of an antibody described herein, e.g., an antibody chosen as described in Table 2, or a sequence substantially identical (e.g., at least 80%, 85%, 90%, 92%, 95%, 97%, 98%, 99% or higher identical) to any of the aforesaid sequences; or which have at least one amino acid alteration, but not more than two, three or four alterations (e.g., substitutions, deletions, or insertions, e.g., conservative substitutions) relative to one, two, or three CDRs according to combined CDR shown in Table 2.

[0693] In some embodiments, the anti-TCRβV antibody molecule, e.g., anti-TCRβ V12 antibody molecule includes at least one, two, or three CDRs according to a combined CDR (e.g., at least one, two, or three CDRs according to the combined CDR definition as set out in Table 2) from a light chain variable region of an antibody described herein, e.g., an antibody as described in Table 2, or a sequence substantially identical (e.g., at least 80%, 85%, 90%, 92%, 95%, 97%, 98%, 99% or higher identical) to any of the aforesaid sequences; or which have at least one amino acid alteration, but not more than two, three or four alterations (e.g., substitutions, deletions, or insertions, e.g., conservative substitutions) relative to one, two, or three CDRs according to a combined CDR shown in Table 2.

[0694] In some embodiments, the anti-TCRβV antibody molecule, e.g., anti-TCRβ V12 antibody molecule includes at least one, two, three, four, five, or six CDRs according to a combined CDR. (e.g., at least one, two, three, four, five, or six CDRs according to the combined CDR definition as set out in Table 2) from the heavy and light chain variable regions of an antibody described herein, e.g., an antibody as described in Table 2, or encoded by the nucleotide sequence in Table 2; or a sequence substantially identical (e.g., at least 80%, 85%, 90%, 92%, 95%, 97%, 98%, 99% or higher identical) to any of the aforesaid sequences; or which have at least one amino acid alteration, but not more than two, three or four alterations (e.g., substitutions, deletions, or insertions, e.g., conservative substitutions) relative to one, two, three, four, five, or six CDRs according to a combined CDR shown in Table 2.

[0695] In some embodiments, the anti-TCRβV antibody molecule, e.g., anti-TCRβ V12 antibody molecule includes all six CDRs according to a combined CDR (e.g., all six CDRs according to the combined CDR definition as set out in Table 2) from the heavy and light chain variable regions of an antibody described herein, e.g., an antibody as described in Table 2, or encoded by the nucleotide sequence in Table 2; or encoded by the nucleotide sequence in Table 2; or a sequence substantially identical (e.g., at least 80%, 85%, 90%, 92%, 95%, 97%, 98%, 99% or higher identical) to any of the aforesaid sequences; or which have at least one amino acid alteration, but not more than two, three or four alterations (e.g., substitutions, deletions, or insertions, e.g., conservative substitutions) relative to all six CDRs according to a combined CDR shown in Table 2. In some embodiments, the anti-TCRβV antibody molecule, e.g., anti-TCRβ V12 antibody molecule may include any CDR described herein.

[0696] In some embodiments, a combined CDR as set out in Table 1 is a CDR that comprises a Kabat CDR and a Chothia CDR.

[0697] In some embodiments, the anti-TCRβV antibody molecule, e e.g., anti-TCRβ V12 antibody molecule, molecule includes a combination of CDRs or hypervariable loops identified as combined CDRs in Table 1. In some embodiments, the anti-TCRβV antibody molecule, e.g., anti-TCRβ V12 antibody molecule, can contain any combination of CDRs or hypervariable loops according the “combined” CDRs are described in Table 1.

[0698] In some embodiments, the anti-TCRβV antibody molecule, e.g., anti-TCRβ V12 antibody molecule includes a combination of CDRs or hypervariable loops defined according to the Kabat et al. and Chothia et al., or as described in Table 1

[0699] In some embodiments, the anti-TCRβV antibody molecule, e.g., anti-TCRβ V12 antibody molecule can contain any combination of CDRs or hypervariable loops according to the Kabat and Chothia definitions.

[0700] In an embodiment, e.g., an embodiment comprising a variable region, a CDR (e.g., a combined CDR, Chothia CDR or Kabat CDR), or other sequence referred to herein, e.g., in Table 2, the antibody molecule is a monospecific antibody molecule, a bispecific antibody molecule, a bivalent antibody molecule, a biparatopic antibody molecule, or an antibody molecule that comprises an antigen binding fragment of an antibody, e.g., a half antibody or antigen binding fragment of a half antibody. In certain embodiments the antibody molecule comprises a multispecific molecule, e.g., a bispecific molecule, e.g., as described herein.

[0701] In some embodiments, the anti-TCRβV antibody molecule, e.g., anti-TCRβ V12 antibody molecule includes:

[0702] (i) one, two or all of a light chain complementarity determining region 1 (LC CDR1), a light chain complementarity determining region 2 (LC CDR2), and a light chain complementarity determining region 3 (LC CDR3) of SEQ ID NO: 16, SEQ ID NO: 26, SEQ ID NO: 27, SEQ ID NO: 28, SEQ ID NO: 29 or SEQ ID NO: 30, and/or

[0703] (ii) one, two or all of a heavy chain complementarity determining region 1 (HC CDR1), heavy chain complementarity determining region 2 (HC CDR2), and a heavy chain complementarity determining region 3 (HC CDR3) of SEQ ID NO: 15, SEQ ID NO: 23, SEQ ID NO: 24 or SEQ ID NO: 25.

[0704] In some embodiments, the anti-TCRβV antibody molecule, e.g., anti-TCRβ V12 antibody molecule comprises:

[0705] (i) a LC CDR1 amino acid sequence of SEQ ID NO: 20, a LC CDR2 amino acid sequence of SEQ ID NO: 21, or a LC CDR3 amino acid sequence of SEQ ID NO: 22; and/or

[0706] (ii) a HC CDR1 amino acid sequence of SEQ ID NO: 17, a HC CDR2 amino acid sequence of SEQ ID NO: 18, or a HC CDR3 amino acid sequence of SEQ ID NO: 19.

[0707] In some embodiments, the anti-TCRβV antibody molecule, e.g., anti-TCRβ V12 antibody molecule comprises:

[0708] (i) a light chain variable region (VL) comprising a LC CDR1 amino acid sequence of SEQ ID NO: 20, a LC CDR2 amino acid sequence of SEQ ID NO: 21, and a LC CDR3 amino acid sequence of SEQ ID NO: 2; and/or

[0709] (ii) a heavy chain variable region (VH) comprising a HC CDR1 amino acid sequence of SEQ ID NO: 17, a HC CDR2 amino acid sequence of SEQ ID NO: 18, and a HC CDR3 amino acid sequence of SEQ ID NO: 19.

[0710] In some embodiments, the anti-TCRβV antibody molecule, e.g., anti-TCRβ V12 antibody molecule comprises:

[0711] (i) a LC CDR1 amino acid sequence of SEQ ID NO: 63, a LC CDR2 amino acid sequence of SEQ ID NO: 64, or a LC CDR3 amino acid sequence of SEQ ID NO: 65; and/or

[0712] (ii) a HC CDR1 amino acid sequence of SEQ ID NO: 57, a HC CDR2 amino acid sequence of SEQ ID NO: 58, or a HC CDR3 amino acid sequence of SEQ ID NO: 59.

[0713] In some embodiments, the anti-TCRβV antibody molecule, e.g., anti-TCRβ V12 antibody molecule comprises:

[0714] (i) a light chain variable region (VL) comprising a LC CDR1 amino acid sequence of SEQ ID NO: 63, a LC CDR2 amino acid sequence of SEQ ID NO: 64, or a LC CDR3 amino acid sequence of SEQ ID NO: 65; and/or

[0715] (ii) a heavy chain variable region (VH) comprising a HC CDR1 amino acid sequence of SEQ ID NO: 57, a HC CDR2 amino acid sequence of SEQ ID NO: 58, or a HC CDR3 amino acid sequence of SEQ ID NO: 59.

[0716] In some embodiments, the anti-TCRβV antibody molecule, e.g., anti-TCRβ V12 antibody molecule comprises:

[0717] (i) a LC CDR1 amino acid sequence of SEQ ID NO: 66, a LC CDR2 amino acid sequence of SEQ ID NO: 67, or a LC CDR3 amino acid sequence of SEQ ID NO: 68; and/or

[0718] (ii) a HC CDR1 amino acid sequence of SEQ ID NO: 60, a HC CDR2 amino acid sequence of SEQ ID NO: 61, or a HC CDR3 amino acid sequence of SEQ ID NO: 62.

[0719] In some embodiments, the anti-TCRβV antibody molecule, e.g., anti-TCRβ V12 antibody molecule comprises:

[0720] (i) a light chain variable region (VL) comprising a LC CDR1 amino acid sequence of SEQ ID NO: 63, a LC CDR2 amino acid sequence of SEQ ID NO: 64, or a LC CDR3 amino acid sequence of SEQ ID NO: 65; and/or

[0721] (ii) a heavy chain variable region (VH) comprising a HC CDR1 amino acid sequence of SEQ ID NO: 57, a HC CDR2 amino acid sequence of SEQ ID NO: 58, or a HC CDR3 amino acid sequence of SEQ ID NO: 59.

[0722] In one embodiment, the light or the heavy chain variable framework (e.g., the region encompassing at least FR1, FR2, FR3, and optionally FR4) of the anti-TCRβV antibody molecule, e.g., anti-TCRβ V12 antibody molecule can be chosen from: (a) a light or heavy chain variable framework including at least 80%, 85%, 87% 90%, 92%, 93%, 95%, 97%, 98%, or 100% of the amino acid residues from a human light or heavy chain variable framework, e.g., a light or heavy chain variable framework residue from a human mature antibody, a human germline sequence, or a human consensus sequence; (b) a light or heavy chain variable framework including from 20% to 80%, 40% to 60%, 60% to 90%, or 70% to 95% of the amino acid residues from a human light or heavy chain variable framework, e.g., a light or heavy chain variable framework residue from a human mature antibody, a human germline sequence, or a human consensus sequence; (c) a non-human framework (e.g., a rodent framework); or (d) a non-human framework that has been modified, e.g., to remove antigenic or cytotoxic determinants, e.g., deimmunized, or partially humanized. In one embodiment, the light or heavy chain variable framework region (particularly FR1, FR2 and/or FR3) includes a light or heavy chain variable framework sequence at least 70, 75, 80, 85, 87, 88, 90, 92, 94, 95, 96, 97, 98, 99% identical or identical to the frameworks of a VL or VH segment of a human germline gene.

[0723] In some embodiments, the anti-TCRβV antibody molecule, e.g., anti-TCRβ V12 antibody molecule, comprises a heavy chain variable domain having at least one, two, three, four, five, six, seven, ten, fifteen, twenty or more changes, e.g., amino acid substitutions or deletions, from an amino acid sequence described in Table 2. e.g., the amino acid sequence of the FR region in the entire variable region, e.g., shown in FIGS. 2A and 2B, or in SEQ ID NOs: 23-25.

[0724] Alternatively, or in combination with the heavy chain substitutions described herein the anti-TCRβV antibody molecule, e.g., anti-TCRβ V12 antibody molecule comprises a light chain variable domain having at least one, two, three, four, five, six, seven, ten, fifteen, twenty or more amino acid changes, e.g., amino acid substitutions or deletions, from an amino acid sequence of an antibody described herein. e.g., the amino acid sequence of the FR region in the entire variable region, e.g., shown in FIGS. 2A and 2B, or in SEQ ID NOs: 26-30.

[0725] In some embodiments, the anti-TCRβV antibody molecule, e.g., anti-TCRβ V12 antibody molecule includes one, two, three, or four heavy chain framework regions shown in FIG. 2A, or a sequence substantially identical thereto.

[0726] In some embodiments, the anti-TCRβV antibody molecule, e.g., anti-TCRβ V12 antibody molecule includes one, two, three, or four light chain framework regions shown in FIG. 2B, or a sequence substantially identical thereto.

[0727] In some embodiments, the anti-TCRβV antibody molecule, e.g., anti-TCRβ V12 antibody molecule comprises the light chain framework region 1 e.g., as shown in FIG. 2B.

[0728] In some embodiments, the anti-TCRβV antibody molecule, e.g., anti-TCRβ V12 antibody molecule comprises the light chain framework region 2 e.g., as shown in FIG. 2B.

[0729] In some embodiments, the anti-TCRβV antibody molecule, e.g., anti-TCRβ V12 antibody molecule comprises the light chain framework region 3, e.g., as shown in FIG. 2B.

[0730] In some embodiments, the anti-TCRβV antibody molecule, e.g., anti-TCRβ V12 antibody molecule comprises the light chain framework region 4, e.g., as shown in FIG. 2B.

[0731] In some embodiments, the anti-TCRβV antibody molecule, e.g., anti-TCRβ V12 antibody molecule comprises a light chain comprising a framework region, e.g., framework region 1 (FR1), comprising a change, e.g., a substitution (e.g., a conservative substitution) at one or more, e.g., all, position disclosed herein according to Kabat numbering. In some embodiments, FR1 comprises an Aspartic Acid at position 1, e.g., a substitution at position 1 according to Kabat numbering, e.g., an Alanine to Aspartic Acid substitution. In some embodiments, FR1 comprises an Asparagine at position 2, e.g., a substitution at position 2 according to Kabat numbering, e.g., an Isoleucine to Asparagine substitution, Serine to Asparagine substitution or Tyrosine to Asparagine substitution. In some embodiments, FR1 comprises a Leucine at position 4, e.g., a substitution at position 4 according to Kabat numbering, e.g., a Methionine to Leucine substitution.

[0732] In some embodiments, the anti-TCRβV antibody molecule, e.g., anti-TCRβ V12 antibody molecule comprises a light chain comprising a framework region, e.g., framework region 1 (FR1), comprising a substitution at position 1 according to Kabat numbering, e.g., an Alanine to Aspartic Acid substitution, a substitution at position 2 according to Kabat numbering, e.g., an Isoleucine to Asparagine substitution, Serine to Asparagine substitution or Tyrosine to Asparagine substitution, and a substitution at position 4 according to Kabat numbering, e.g., a Methionine to Leucine substitution. In some embodiments, the anti-TCRβV antibody molecule, e.g., anti-TCRβ V12 antibody molecule comprises a light chain comprising a framework region, e.g., framework region 1 (FR1), comprising a substitution at position 1 according to Kabat numbering, e.g., an Alanine to Aspartic Acid substitution, and a substitution at position 2 according to Kabat numbering, e.g., an Isoleucine to Asparagine substitution, Serine to Asparagine substitution or Tyrosine to Asparagine substitution. In some embodiments, the anti-TCRβV antibody molecule, e.g., anti-TCRβ V12 antibody molecule comprises a light chain comprising a framework region, e.g., framework region 1 (FR1), comprising a substitution at position 1 according to Kabat numbering, e.g., an Alanine to Aspartic Acid substitution, and a substitution at position 4 according to Kabat numbering, e.g., a Methionine to Leucine substitution. In some embodiments, the anti-TCRβV antibody molecule, e.g., anti-TCRβ V12 antibody molecule comprises a light chain comprising a framework region, e.g., framework region 1 (FR1), comprising a substitution at position 2 according to Kabat numbering, e.g., an Isoleucine to Asparagine substitution, Serine to Asparagine substitution or Tyrosine to Asparagine substitution, and a substitution at position 4 according to Kabat numbering, e.g., a Methionine to Leucine substitution. In some embodiments, the substitution is relative to a human germline light chain framework region sequence.

[0733] In some embodiments, the anti-TCRβV antibody molecule, e.g., anti-TCRβ V12 antibody molecule comprises a light chain comprising a framework region, e.g., framework region 3 (FR3), comprising a change, e.g., a substitution (e.g., a conservative substitution) at one or more, e.g., all, position disclosed herein according to Kabat numbering. In some embodiments, FR3 comprises a Glycine at position 66, e.g., a substitution at position 66 according to Kabat numbering, e.g., a Lysine to Glycine substitution, or a Serine to Glycine substitution. In some embodiments, FR3 comprises an Asparagine at position 69, e.g., a substitution at position 69 according to Kabat numbering, e.g., a Tyrosine to Asparagine substitution. In some embodiments, FR3 comprises a Tyrosine at position 71, e.g., a substitution at position 71 according to Kabat numbering, e.g., a Phenylalanine to Tyrosine substitution, or an Alanine to Tyrosine substitution.

[0734] In some embodiments, the anti-TCRβV antibody molecule, e.g., anti-TCRβ V12 antibody molecule comprises a light chain comprising a framework region, e.g., framework region 3 (FR3), comprising a substitution at position 66 according to Kabat numbering, e.g., a Lysine to Glycine substitution, or a Serine to Glycine substitution, and a substitution at position 69 according to Kabat numbering, e.g., a Tyrosine to Asparagine substitution. In some embodiments, the anti-TCRβV antibody molecule, e.g., anti-TCRβ V12 antibody molecule comprises a light chain comprising a framework region, e.g., framework region 3 (FR3), comprising a substitution at position 66 according to Kabat numbering, e.g., Lysine to Glycine substitution, or a Serine to Glycine substitution, and a substitution at position 71 according to Kabat numbering, e.g., a Phenylalanine to Tyrosine substitution, or an Alanine to Tyrosine substitution. In some embodiments, the anti-TCRβV antibody molecule, e.g., anti-TCRβ V12 antibody molecule comprises a light chain comprising a framework region, e.g., framework region 3 (FR3), comprising a substitution at position 69 according to Kabat numbering, e.g., a Tyrosine to Asparagine substitution and a substitution at position 71 according to Kabat numbering, e.g., a Phenylalanine to Tyrosine substitution, or an Alanine to Tyrosine substitution. In some embodiments, the anti-TCRβV antibody molecule, e.g., anti-TCRβ V12 antibody molecule comprises a light chain comprising a framework region, e.g., framework region 3 (FR3), comprising a substitution at position 66 according to Kabat numbering, e.g., a Lysine to Glycine substitution, or a Serine to Glycine substitution, a substitution at position 69 according to Kabat numbering, e.g., a Tyrosine to Asparagine substitution and a substitution at position 71 according to Kabat numbering, e.g., a Phenylalanine to Tyrosine substitution, or an Alanine to Tyrosine substitution. In some embodiments, the substitution is relative to a human germline light chain framework region sequence.

[0735] In some embodiments, the anti-TCRβV antibody molecule, e.g., anti-TCRβ V12 antibody molecule comprises a light chain comprising: a framework region 1 (FR1) comprising a substitution at position 2 according to Kabat numbering, e.g., a Isoleucine to Asparagine substitution; and a framework region 3 (FR3), comprising a substitution at position 69 according to Kabat numbering, e.g., a Threonine to Asparagine substitution and a substitution at position 71 according to Kabat numbering, e.g., a Phenylalanine to Tyrosine substitution, e.g., as shown in the amino acid sequence of SEQ ID NO: 26. In some embodiments, the substitution is relative to a human germline light chain framework region sequence.

[0736] In some embodiments, the anti-TCRβV antibody molecule, e.g., anti-TCRβ V12 antibody molecule comprises a light chain comprising: (a) a framework region 1 (FR1) comprising a substitution at position 1 according to Kabat numbering, e.g., a Alanine to Aspartic Acid substitution, and a substitution at position 2 according to Kabat numbering, e.g., a Isoleucine to Asparagine substitution; and (b) a framework region 3 (FR3), comprising a substitution at position 69 according to Kabat numbering, e.g., a Threonine to Asparagine substitution and a substitution at position 71 according to Kabat numbering, e.g., a Phenylalanine to Tyrosine substitution, e.g., as shown in the amino acid sequence of SEQ ID NO: 27 In some embodiments, the substitution is relative to a human germline light chain framework region sequence.

[0737] In some embodiments, the anti-TCRβV antibody molecule, e.g., anti-TCRβ V12 antibody molecule comprises a light chain comprising: (a) a framework region 1 (FR1) comprising a substitution at position 2 according to Kabat numbering, e.g., a Serine to Asparagine substitution; and a substitution at position 4 according to Kabat numbering, e.g., a Methionine to Leucine substitution; and (b) a framework region 3 (FR3), comprising a substitution at position 69 according to Kabat numbering, e.g., a Threonine to Asparagine substitution and a substitution at position 71 according to Kabat numbering, e.g., a Phenylalanine to Tyrosine substitution, e.g., as shown in the amino acid sequence of SEQ ID NO: 28 In some embodiments, the substitution is relative to a human germline light chain framework region sequence.

[0738] In some embodiments, the anti-TCRβV antibody molecule, e.g., anti-TCRβ V12 antibody molecule comprises a light chain comprising: (a) a framework region 1 (FR1) comprising a substitution at position 2 according to Kabat numbering, e.g., a Serine to Asparagine substitution; and (b) a framework region 3 (FR3) comprising a substitution at position 66 according to Kabat numbering, e.g., a Lysine to Glycine substitution; a substitution at position 69 according to Kabat numbering, e.g., a Threonine to Asparagine substitution; and a substitution at position 71 according to Kabat numbering, e.g., a Alanine to Tyrosine substitution, e.g., as shown in the amino acid sequence of SEQ ID NO: 29. In some embodiments, the substitution is relative to a human germline light chain framework region sequence.

[0739] In some embodiments, the anti-TCRβV antibody molecule, e.g., anti-TCRβ V12 antibody molecule comprises a light chain comprising: (a) a framework region 1 (FR1) comprising a substitution at position 2 according to Kabat numbering, e.g., a Tyrosine to Asparagine substitution; and (b) a framework region 3 (FR3) comprising a substitution at position 66 according to Kabat numbering, e.g., a Serine to Glycine substitution; a substitution at position 69 according to Kabat numbering, e.g., a Threonine to Asparagine substitution; and a substitution at position 71 according to Kabat numbering, e.g., a Alanine to Tyrosine substitution, e.g., as shown in the amino acid sequence of SEQ ID NO: 29. In some embodiments, the substitution is relative to a human germline light chain framework region sequence.

[0740] In some embodiments, the anti-TCRβV antibody molecule, e.g., anti-TCRβ V12 antibody molecule comprises a light chain variable domain comprising: (a) a framework region 1 (FR1) comprising a change, e.g., a substitution (e.g., a conservative substitution) at one or more (e.g., all) positions disclosed herein according to Kabat numbering, and (b) a framework region 3 (FR3) comprising a change, e.g., a substitution (e.g., a conservative substitution) at one or more (e.g., all) position disclosed herein according to Kabat numbering. In some embodiments, the substitution is relative to a human germline light chain framework region sequence.

[0741] In some embodiments, the anti-TCRβV antibody molecule, e.g., anti-TCRβ V12 antibody molecule comprises the heavy chain framework region 1, e.g., as shown in FIG. 2A.

[0742] In some embodiments, the anti-TCRβV antibody molecule, e.g., anti-TCRβ V12 antibody molecule comprises the heavy chain framework region 2, e.g., as shown in FIG. 2A.

[0743] In some embodiments, the anti-TCRβV antibody molecule, e.g., anti-TCβ V12 antibody molecule comprises the heavy chain framework region 3, e.g., as shown in FIG. 2A.

[0744] In some embodiments, the anti-TCRβV antibody molecule, e.g., anti-TCβ V12 antibody molecule comprises the heavy chain framework region 4, e.g., as shown in FIG. 2A.

[0745] In some embodiments, the anti-TCRβV antibody molecule, e.g., anti-TCβ V12 antibody molecule comprises the heavy chain framework regions 1-4, e.g., SEQ ID NOS: 20-23, or as shown in FIG. 2A.

[0746] In some embodiments, the anti-TCRβV antibody molecule, e.g., anti-TCβ V12 antibody molecule comprises the light chain framework regions 1-4, e.g., SEQ ID NOs: 26-30, or as shown in FIG. 2B.

[0747] In some embodiments, the anti-TCRβV antibody molecule, e.g., anti-TCβ V12 antibody molecule comprises the heavy chain framework regions 1-4, e.g., SEQ ID NOs: 23-25; and the light chain framework regions 1-4, e.g., SEQ ID NOs: 26-30, or as shown in FIGS. 2A and 2B.

[0748] In some embodiments, the heavy or light chain variable domain, or both, of, the anti-TCRβV antibody molecule, e.g., anti-TCβ V12 antibody molecule includes an amino acid sequence, which is substantially identical to an amino acid disclosed herein, e.g., at least 80%, 85%, 90%, 92%, 95%, 97%, 98%, 99% or higher identical to a variable region of an antibody described herein, e.g., an antibody as described in Table 2, or encoded by the nucleotide sequence in Table 2; or which differs at least 1 or 5 residues, but less than 40, 30, 20, or 10 residues, from a variable region of an antibody described herein.

[0749] In some embodiments, the anti-TCRβV antibody molecule, e.g., anti-TCβ V12 antibody molecule comprises at least one, two, three, or four antigen-binding regions, e.g., variable regions, having an amino acid sequence as set forth in Table 2, or a sequence substantially identical thereto (e.g., a sequence at least about 85%, 90%, 95%, 99% or more identical thereto, or which differs by no more than 1, 2, 5, 10, or 15 amino acid residues from the sequences shown in Table 2. In another embodiment, the anti-TCRβV antibody molecule, e.g., anti-TCβ V12 antibody molecule includes a VH and/or VL domain encoded by a nucleic acid having a nucleotide sequence as set forth in Table 2, or a sequence substantially identical thereto (e.g., a sequence at least about 85%, 90%, 95%, 99% or more identical thereto, or which differs by no more than 3, 6, 15, 30, or 45 nucleotides from the sequences shown in Table 2.

[0750] In some embodiments, the anti-TCRβV antibody molecule, e.g., anti-TCβ V12 antibody molecule comprises:

[0751] a VH domain comprising an amino acid sequence chosen from the amino acid sequence of SEQ ID NO: 23, SEQ ID NO:24 or SEQ ID NO:25, an amino acid sequence at least about 85%, 90%, 95%, 99% or more identical to the amino acid sequence SEQ ID NO: 23, SEQ ID NO:24 or SEQ ID NO:25, or an amino acid sequence which differs by no more than 1, 2, 5, 10, or 15 amino acid residues from the amino acid sequence of SEQ ID NO: 23, SEQ ID NO:24 or SEQ ID NO:25; and/or

[0752] a VL domain comprising an amino acid sequence chosen from the amino acid sequence of SEQ ID NO: 26, SEQ ID NO: 27, SEQ ID NO: 28, SEQ ID NO: 29 or SEQ ID NO: 30, an amino acid sequence at least about 85%, 90%, 95%, 99% or more identical to the amino acid sequence of SEQ ID NO: 26, SEQ ID NO: 27, SEQ ID NO: 28, SEQ ID NO: 29 or SEQ ID NO: 30, or an amino acid sequence which differs by no more than 1, 2, 5, 10, or 15 amino acid residues from the amino acid sequence of SEQ ID NO: 26, SEQ ID NO: 27, SEQ ID NO: 28, SEQ ID NO: 29 or SEQ ID NO: 30.

[0753] In some embodiments, the anti-TCRβV antibody molecule, e.g., anti-TCβ V12 antibody molecule comprises:

[0754] a VH domain comprising the amino acid sequence of SEQ ID NO: 23, an amino acid sequence at least about 85%, 90%, 95%, 99% or more identical to the amino acid sequence SEQ ID NO: 23, or an amino acid sequence which differs by no more than 1, 2, 5, 10, or 15 amino acid residues from the amino acid sequence of SEQ ID NO: 23; and

[0755] a VL domain comprising the amino acid sequence of SEQ ID NO: 26, an amino acid sequence at least about 85%, 90%, 95%, 99% or more identical to the amino acid sequence SEQ ID NO: 26, or an amino acid sequence which differs by no more than 1, 2, 5, 10, or 15 amino acid residues from the amino acid sequence of SEQ ID NO: 26.

[0756] In some embodiments, the anti-TCRβV antibody molecule, e.g., anti-TCβ V12 antibody molecule comprises:

[0757] a VH domain comprising the amino acid sequence of SEQ ID NO: 23, an amino acid sequence at least about 85%, 90%, 95%, 99% or more identical to the amino acid sequence SEQ ID NO: 23, or an amino acid sequence which differs by no more than 1, 2, 5, 10, or 15 amino acid residues from the amino acid sequence of SEQ ID NO: 23; and

[0758] a VL domain comprising the amino acid sequence of SEQ ID NO: 27, an amino acid sequence at least about 85%, 90%, 95%, 99% or more identical to the amino acid sequence SEQ ID NO: 27, or an amino acid sequence which differs by no more than 1, 2, 5, 10, or 15 amino acid residues from the amino acid sequence of SEQ ID NO: 27.

[0759] In some embodiments, the anti-TCRβV antibody molecule, e.g., anti-TCβ V12 antibody molecule comprises:

[0760] a VH domain comprising the amino acid sequence of SEQ ID NO: 23, an amino acid sequence at least about 85%, 90%, 95%, 99% or more identical to the amino acid sequence SEQ ID NO: 23, or an amino acid sequence which differs by no more than 1, 2, 5, 10, or 15 amino acid residues from the amino acid sequence of SEQ ID NO: 23; and

[0761] a VL domain comprising the amino acid sequence of SEQ ID NO: 28, an amino acid sequence at least about 85%, 90%, 95%, 99% or more identical to the amino acid sequence SEQ ID NO: 28, or an amino acid sequence which differs by no more than 1, 2, 5, 10, or 15 amino acid residues from the amino acid sequence of SEQ ID NO: 28.

[0762] In some embodiments, the anti-TCRβV antibody molecule, e.g., anti-TCβ V12 antibody molecule comprises:

[0763] a VH domain comprising the amino acid sequence of SEQ ID NO: 23, an amino acid sequence at least about 85%, 90%, 95%, 99% or more identical to the amino acid sequence SEQ ID NO: 23, or an amino acid sequence which differs by no more than 1, 2, 5, 10, or 15 amino acid residues from the amino acid sequence of SEQ ID NO: 23; and

[0764] a VL domain comprising the amino acid sequence of SEQ ID NO: 29, an amino acid sequence at least about 85%, 90%, 95%, 99% or more identical to the amino acid sequence SEQ ID NO: 29, or an amino acid sequence which differs by no more than 1, 2, 5, 10, or 15 amino acid residues from the amino acid sequence of SEQ ID NO: 29.

[0765] In some embodiments, the anti-TCRβV antibody molecule, e.g., anti-TCβ V12 antibody molecule comprises:

[0766] a VH domain comprising the amino acid sequence of SEQ ID NO: 23, an amino acid sequence at least about 85%, 90%, 95%, 99% or more identical to the amino acid sequence SEQ ID NO: 23, or an amino acid sequence which differs by no more than 1, 2, 5, 10, or 15 amino acid residues from the amino acid sequence of SEQ ID NO: 23; and

[0767] a VL domain comprising the amino acid sequence of SEQ ID NO: 30, an amino acid sequence at least about 85%, 90%, 95%, 99% or more identical to the amino acid sequence SEQ ID NO: 30, or an amino acid sequence which differs by no more than 1, 2, 5, 10, or 15 amino acid residues from the amino acid sequence of SEQ ID NO: 30.

[0768] In some embodiments, the anti-TCRβV antibody molecule, e.g., anti-TCβ V12 antibody molecule comprises:

[0769] a VH domain comprising the amino acid sequence of SEQ ID NO: 24 or 25, an amino acid sequence at least about 85%, 90%, 95%, 99% or more identical to the amino acid sequence SEQ ID NO: 24 or 25, or an amino acid sequence which differs by no more than 1, 2, 5, 10, or 15 amino acid residues from the amino acid sequence of SEQ ID NO: 24 or 25; and

[0770] a VL domain comprising the amino acid sequence of SEQ ID NO: 26, an amino acid sequence at least about 85%, 90%, 95%, 99% or more identical to the amino acid sequence SEQ ID NO: 26, or an amino acid sequence which differs by no more than 1, 2, 5, 10, or 15 amino acid residues from the amino acid sequence of SEQ ID NO: 26.

[0771] In some embodiments, the anti-TCRβV antibody molecule, e.g., anti-TCβ V12 antibody molecule comprises:

[0772] a VH domain comprising the amino acid sequence of SEQ ID NO: 24 or 25, an amino acid sequence at least about 85%, 90%, 95%, 99% or more identical to the amino acid sequence SEQ ID NO: 24 or 25, or an amino acid sequence which differs by no more than 1, 2, 5, 10, or 15 amino acid residues from the amino acid sequence of SEQ ID NO: 24 or 25; and

[0773] a VL domain comprising the amino acid sequence of SEQ ID NO: 27, an amino acid sequence at least about 85%, 90%, 95%, 99% or more identical to the amino acid sequence SEQ ID NO: 27, or an amino acid sequence which differs by no more than 1, 2, 5, 10, or 15 amino acid residues from the amino acid sequence of SEQ ID NO: 27.

[0774] In some embodiments, the anti-TCRβV antibody molecule, e.g., anti-TCβ V12 antibody molecule comprises:

[0775] a VH domain comprising the amino acid sequence of SEQ ID NO: 24 or 25, an amino acid sequence at least about 85%, 90%, 95%, 99% or more identical to the amino acid sequence SEQ ID NO: 24 or 25, or an amino acid sequence which differs by no more than 1, 2, 5, 10, or 15 amino acid residues from the amino acid sequence of SEQ ID NO: 24 or 25; and

[0776] a VL domain comprising the amino acid sequence of SEQ ID NO: 28, an amino acid sequence at least about 85%, 90%, 95%, 99% or more identical to the amino acid sequence SEQ ID NO: 28, or an amino acid sequence which differs by no more than 1, 2, 5, 10, or 15 amino acid residues from the amino acid sequence of SEQ ID NO: 28.

[0777] In some embodiments, the anti-TCRβV antibody molecule, e.g., anti-TCβ V12 antibody molecule comprises:

[0778] a VH domain comprising the amino acid sequence of SEQ ID NO: 24 or 25, an amino acid sequence at least about 85%, 90%, 95%, 99% or more identical to the amino acid sequence SEQ ID NO: 24 or 25, or an amino acid sequence which differs by no more than 1, 2, 5, 10, or 15 amino acid residues from the amino acid sequence of SEQ ID NO: 24 or 25; and

[0779] a VL domain comprising the amino acid sequence of SEQ ID NO: 29, an amino acid sequence at least about 85%, 90%, 95%, 99% or more identical to the amino acid sequence SEQ ID NO: 29, or an amino acid sequence which differs by no more than 1, 2, 5, 10, or 15 amino acid residues from the amino acid sequence of SEQ ID NO: 29.

[0780] In some embodiments, the anti-TCRβV antibody molecule, e.g., anti-TCβ V12 antibody molecule comprises:

[0781] a VH domain comprising the amino acid sequence of SEQ ID NO: 24 or 25, an amino acid sequence at least about 85%, 90%, 95%, 99% or more identical to the amino acid sequence SEQ ID NO: 24 or 25, or an amino acid sequence which differs by no more than 1, 2, 5, 10, or 15 amino acid residues from the amino acid sequence of SEQ ID NO: 24 or 25; and

[0782] a VL domain comprising the amino acid sequence of SEQ ID NO: 30, an amino acid sequence at least about 85%, 90%, 95%, 99% or more identical to the amino acid sequence SEQ ID NO: 30, or an amino acid sequence which differs by no more than 1, 2, 5, 10, or 15 amino acid residues from the amino acid sequence of SEQ ID NO: 30.

[0783] In some embodiments, the anti-TCRβV antibody molecule, e.g., anti-TCβ V12 antibody molecule comprises:

[0784] a VH domain comprising the amino acid sequence of SEQ ID NO: 25 or 23, an amino acid sequence at least about 85%, 90%, 95%, 99% or more identical to the amino acid sequence SEQ ID NO: 25 or 23, or an amino acid sequence which differs by no more than 1, 2, 5, 10, or 15 amino acid residues from the amino acid sequence of SEQ ID NO: 25 or 23; and

[0785] a VL domain comprising the amino acid sequence of SEQ ID NO: 26, an amino acid sequence at least about 85%, 90%, 95%, 99% or more identical to the amino acid sequence SEQ ID NO: 26, or an amino acid sequence which differs by no more than 1, 2, 5, 10, or 15 amino acid residues from the amino acid sequence of SEQ ID NO: 26.

[0786] In some embodiments, the anti-TCRβV antibody molecule, e.g., anti-TCβ V12 antibody molecule comprises:

[0787] a VH domain comprising the amino acid sequence of SEQ ID NO: 25 or 23, an amino acid sequence at least about 85%, 90%, 95%, 99% or more identical to the amino acid sequence SEQ ID NO: 25 or 23, or an amino acid sequence which differs by no more than 1, 2, 5, 10, or 15 amino acid residues from the amino acid sequence of SEQ ID NO: 25 or 23; and

[0788] a VL domain comprising the amino acid sequence of SEQ ID NO: 27, an amino acid sequence at least about 85%, 90%, 95%, 99% or more identical to the amino acid sequence SEQ ID NO: 27, or an amino acid sequence which differs by no more than 1, 2, 5, 10, or 15 amino acid residues from the amino acid sequence of SEQ ID NO: 27.

[0789] In some embodiments, the anti-TCRβV antibody molecule, e.g., anti-TCβ V12 antibody molecule comprises:

[0790] a VH domain comprising the amino acid sequence of SEQ ID NO: 25 or 23, an amino acid sequence at least about 85%, 90%, 95%, 99% or more identical to the amino acid sequence SEQ ID NO: 25 or 23, or an amino acid sequence which differs by no more than 1, 2, 5, 10, or 15 amino acid residues from the amino acid sequence of SEQ ID NO: 25 or 23; and

[0791] a VL domain comprising the amino acid sequence of SEQ ID NO: 28, an amino acid sequence at least about 85%, 90%, 95%, 99% or more identical to the amino acid sequence SEQ ID NO: 28, or an amino acid sequence which differs by no more than 1, 2, 5, 10, or 15 amino acid residues from the amino acid sequence of SEQ ID NO: 28.

[0792] In some embodiments, the anti-TCRβV antibody molecule, e.g., anti-TCβ V12 antibody molecule comprises:

[0793] a VH domain comprising the amino acid sequence of SEQ ID NO: 25 or 23, an amino acid sequence at least about 85%, 90%, 95%, 99% or more identical to the amino acid sequence SEQ ID NO: 25 or 23, or an amino acid sequence which differs by no more than 1, 2, 5, 10, or 15 amino acid residues from the amino acid sequence of SEQ ID NO: 25 or 23; and

[0794] a VL domain comprising the amino acid sequence of SEQ ID NO: 29, an amino acid sequence at least about 85%, 90%, 95%, 99% or more identical to the amino acid sequence SEQ ID NO: 29, or an amino acid sequence which differs by no more than 1, 2, 5, 10, or 15 amino acid residues from the amino acid sequence of SEQ ID NO: 29.

[0795] In some embodiments, the anti-TCRβV antibody molecule, e.g., anti-TCβ V12 antibody molecule comprises:

[0796] a VH domain comprising the amino acid sequence of SEQ ID NO: 25 or 23, an amino acid sequence at least about 85%, 90%, 95%, 99% or more identical to the amino acid sequence SEQ ID NO: 25 or 23, or an amino acid sequence which differs by no more than 1, 2, 5, 10, or 15 amino acid residues from the amino acid sequence of SEQ ID NO: 25 or 23; and

[0797] a VL domain comprising the amino acid sequence of SEQ ID NO: 30, an amino acid sequence at least about 85%, 90%, 95%, 99% or more identical to the amino acid sequence SEQ ID NO: 30, or an amino acid sequence which differs by no more than 1, 2, 5, 10, or 15 amino acid residues from the amino acid sequence of SEQ ID NO: 30.

[0798] In some embodiments, the anti-TCRβV antibody molecule, e.g., anti-TCRβ V12 antibody molecule is a full antibody or fragment thereof (e.g., a Fab, F(ab′)2, Fv, or a single chain Fv fragment (scFv)). In embodiments, the anti-TCRβV antibody molecule, e.g., anti-TCRβ V6 (e.g., anti-TCRβ V6-5*01) antibody molecule is a monoclonal antibody or an antibody with single specificity. In some embodiments, the anti-TCRβV antibody molecule, e.g., anti-TCRβ V12 antibody molecule, can also be a humanized, chimeric, camelid, shark, or an in vitro-generated antibody molecule. In some embodiments, the anti-TCRβV antibody molecule, e.g., anti-TCRβ V12 antibody molecule is a humanized antibody molecule. The heavy and light chains of the anti-TCRβV antibody molecule, e.g., anti-TCRβ V12 antibody molecule can be full-length (e.g., an antibody can include at least one, and preferably two, complete heavy chains, and at least one, and preferably two, complete light chains) or can include an antigen-binding fragment (e.g., a Fab, F(ab′)2, Fv, a single chain Fv fragment, a single domain antibody, a diabody (dAb), a bivalent antibody, or bispecific antibody or fragment thereof, a single domain variant thereof, or a camelid antibody).

[0799] In some embodiments, the anti-TCRβV antibody molecule, e.g., anti-TCRβ V12 antibody molecule is in the form of a multispecific molecule, e.g., a bispecific molecule, e.g., as described herein.

[0800] In some embodiments, the anti-TCRβV antibody molecule, e.g., anti-TCRβ V12 antibody molecule has a heavy chain constant region (Fc) chosen from, e.g., the heavy chain constant regions of IgG1, IgG2, IgG3, IgG4, IgM, IgA1, IgA2, IgD, and IgE. In some embodiments, the Fc region is chosen from the heavy chain constant regions of IgG1, IgG2, IgG3, and IgG4. In some embodiments, the Fc region is chosen from the heavy chain constant region of IgG1 or IgG2 (e.g., human IgG1, or IgG2). In some embodiments, the heavy chain constant region is human IgG1.

[0801] In some embodiments, the anti-TCRβV antibody molecule, e.g., anti-TCRβ V12 antibody molecule has a light chain constant region chosen from, e.g., the light chain constant regions of kappa or lambda, preferably kappa (e.g., human kappa). In one embodiment, the constant region is altered, e.g., mutated, to modify the properties of the anti-TCRβV antibody molecule, e.g., anti-TCRβ V12 antibody molecule (e.g., to increase or decrease one or more of: Fc receptor binding, antibody glycosylation, the number of cysteine residues, effector cell function, or complement function). For example, the constant region is mutated at positions 296 (M to Y), 298 (S to T), 300 (T to E), 477 (H to K) and 478 (N to F) to alter Fc receptor binding (e.g., the mutated positions correspond to positions 132 (M to Y), 134 (S to T), 136 (T to E), 313 (H to K) and 314 (N to F) of SEQ ID NOs: 212 or 214; or positions 135 (M to Y), 137 (S to T), 139 (T to E), 316 (H to K) and 317 (N to F) of SEQ ID NOs: 215, 216, 217 or 218).

[0802] Antibody B-H.1 comprises a first chain comprising the amino acid sequence of SEQ ID NO: 3280 and a second chain comprising the amino acid sequence of SEQ ID NO: 3281.

[0803] Additional exemplary anti-TCRβ V12 antibodies of the disclosure are provided in Table 2. In some embodiments, the anti-TCRβ V12 is antibody B, e.g., humanized antibody B (antibody B-H), as provided in Table 2. In some embodiments, the anti-TCRβV antibody comprises one or more (e.g., all three) of a LC CDR1, LC CDR2, and LC CDR3 provided in Table 2; and/or one or more (e.g., all three) of a HC CDR1, HC CDR2, and HC CDR3 provided in Table 2, or a sequence with at least 95% identity thereto. In some embodiments, antibody B comprises a variable heavy chain (VH) and/or a variable light chain (VL) provided in Table 2, or a sequence with at least 95% identity thereto.

[0804] In some embodiments, the anti-TCRVB 12 antibody molecule (e.g., anti-TCRVB 12-3 or anti-TCRVB 12-4 antibody molecule) comprises a VH of B-H.1A, B-H.1B, B-H.1C, B-H.1D, B-H.1E, B-H.1F, B-H.1G, B-H.1H, B-H.1, B-H.2, B-H.3, B-H.4, B-H.5, or B-H.6, or a sequence with at least 80%, 85%, 90%, 95%, 96%, 97%, 98%, 99% or more identity thereto.

[0805] In some embodiments, the anti-TCRVB 12 antibody molecule (e.g., anti-TCRVB 12-3 or anti-TCRVB 12-4 antibody molecule) comprises a VL of B-H.1A, B-H.1B, B-H.1C, B-H.1D, B-H.1E, B-H.1F, B-H.1G, B-H.1H, B-H.1, B-H.2, B-H.3, B-H.4, B-H.5, or B-H.6, or a sequence with at least 80%, 85%, 90%, 95%, 96%, 97%, 98%, 99% or more identity thereto.

[0806] In some embodiments, the anti-TCRVB 12 antibody molecule (e.g., anti-TCRVB 12-3 or anti-TCRVB 12-4 antibody molecule) comprises a VH of B-H.1A, B-H.1B, B-H.1C, B-H.1D, B-H.1E, B-H.1F, B-H.1G, B-H.1H, B-H.1, B-H.2, B-H.3, B-H.4, B-H.5, or B-H.6, or a sequence with at least 80%, 85%, 90%, 95%, 96%, 97%, 98%, 99% or more identity thereto; and a VL of B-H.1A, B-H.1B, B-H.1C, B-H.1D, B-H.1E, B-H.1F, B-H.1G, B-H.1H, B-H.1, B-H.2, B-H.3, B-H.4, B-H.5, or B-H.6, or a sequence with at least 80%, 85%, 90%, 95%, 96%, 97%, 98%, 99% or more identity thereto.

TABLE 2
Amino acid and nucleotide sequences for murine and humanized antibody molecules
which bind to TCRVB 12, e.g., TCRVB 12-3 or TCRVB 12-4. The antibody molecules include
murine mAb Antibody B and humanized mAb Antibody B-H.1 to B-H.6. The amino acid the
heavy and light chain CDRs, and the amino acid and nucleotide sequences of the heavy
and light chain variable regions, and the heavy and light chains are shown.
Antibody B (murine), also referred to as 16G8

| | | |
|---|---|---|
| SEQ ID NO: 17 | HC CDR1 (Combined) | GFTFSNFGMH |
| SEQ ID NO: 18 | HC CDR2 (Combined) | YISSGSSTIYYADTLKG |
| SEQ ID NO: 19 | HC CDR3 (Combined) | RGEGAMDY |
| SEQ ID NO: 57 | HC CDR1 (Kabat) | NFGMH |
| SEQ ID NO: 58 | HC CDR2 (Kabat) | YISSGSSTIYYADTLKG |
| SEQ ID NO: 59 | HC CDR3 (Kabat) | RGEGAMDY |
| SEQ ID NO: 60 | HC CDR1 (Chothia) | GFTFSNF |
| SEQ ID NO: 61 | HC CDR2 (Chothia) | SSGSST |
| SEQ ID NO: 62 | HC CDR3 (Chothia) | RGEGAMDY |
| SEQ ID NO: 15 | VH | DVQLVESGGGLVQPGGSRKLSCAASGFTFSNFGMH |
| | | WVRQAPDKGLEWVAYISSGSSTIYYADTLKGRFTIS |
| | | RDNPKNTLFLQMTSLRSEDTAMYYCARRGEGAMD |
| | | YWGQGTSVTVSS |
| SEQ ID NO: 20 | LC CDR1 (Combined) | RASSSVNYIY |
| SEQ ID NO: 21 | LC CDR2 (Combined) | YTSNLAP |
| SEQ ID NO: 22 | LC CDR3 (Combined) | QQFTSSPFT |
| SEQ ID NO: 63 | LC CDR1 (Kabat) | RASSSVNYIY |
| SEQ ID NO: 64 | LC CDR2 (Kabat) | YTSNLAP |
| SEQ ID NO: 65 | LC CDR3 (Kabat) | QQFTSSPFT |
| SEQ ID NO: 66 | LC CDR1 (Chothia) | RASSSVNYIY |
| SEQ ID NO: 67 | LC CDR2 (Chothia) | YTSNLAP |
| SEQ ID NO: 68 | LC CDR3 (Chothia) | QQFTSSPFT |
| SEQ ID NO: 16 | VL | ENVLTQSPAIMSASLGEKVTMSCRASSSVNYIYWY |
| | | QQKSDASPKLWIYYTSNLAPGVPTRFSGSGSGNSYS |
| | | LTISSMEGEDAATYYCQQFTSSPFTFGSGTKLEIK |

Antibody B humanized (B-H)
Antibody B-H.1A HC-1

| | | |
|---|---|---|
| SEQ ID NO: 17 | HC CDR1 (Combined) | GFTFSNFGMH |
| SEQ ID NO: 18 | HC CDR2 (Combined) | YISSGSSTIYYADTLKG |
| SEQ ID NO: 19 | HC CDR3 (Combined) | RGEGAMDY |
| SEQ ID NO: 3438 | VH | EVQLVESGGGLVQPGGSLRLSCAASGFTFSNFGMH |
| | | WVRQAPGKGLEWVSYISSGSSTIYYADTLKGRFTIS |
| | | RDNAKNSLYLQMNSLRAEDTAVYYCARRGEGAM |
| | | DYWGQGTTVTVSS |
| SEQ ID NO: 31 | DNA VH | GAGGTGCAGCTGGTTGAATCTGGCGGAGGATTG |
| | | GTTCAGCCTGGCGGCTCTCTGAGACTGTCTTGTG |
| | | CCGCTTCTGGCTTCACCTTCTCCAACTTCGGCATG |
| | | CACTGGGTCCGACAGGCCCCTGGAAAAGGACTG |
| | | GAATGGGTGTCCTACATCTCCTCCGGCTCCTCCA |
| | | CCATCTACTACGCTGACACCCTGAAGGGCAGATT |
| | | CACCATCTCTCGGGACAACGCCAAGAACTCCCTG |
| | | TACCTGCAGATGAACAGCCTGAGAGCCGAGGAC |
| | | ACCGCCGTGTACTACTGTGCTAGAAGAGGCGAG |
| | | GGCGCCATGGATTATTGGGGCCAGGGAACCACA |
| | | GTGACCGTGTCTAGC |

Antibody B-H.1B UC-2

| | | |
|---|---|---|
| SEQ ID NO: 17 | HC CDR1 (Combined) | GFTFSNFGMH |
| SEQ ID NO: 18 | HC CDR2 (Combined) | YISSGSSTIYYADTLKG |
| SEQ ID NO: 19 | HC CDR3 (Combined) | RGEGAMDY |
| SEQ ID NO: 25 | VH | EVQLVESGGGLVQPGGSLRLSCAASGFTFSNFGMH |
| | | WVRQAPGKGLEWVSYISSGSSTIYYADTLKGRFTIS |
| | | RDNSKNTLYLQMNSLRAEDTAVYYCARRGEGAM |
| | | DYWGQGTTVTVSS |
| SEQ ID NO: 32 | DNA VH | GAGGTGCAGCTGGTTGAATCTGGCGGAGGATTG |
| | | GTTCAGCCTGGCGGCTCTCTGAGACTGTCTTGTG |
| | | CCGCTTCTGGCTTCACCTTCTCCAACTTCGGCATG |
| | | CACTGGGTCCGACAGGCCCCTGGAAAAGGACTG |
| | | GAATGGGTGTCCTACATCTCCTCCGGCTCCTCCA |
| | | CCATCTACTACGCTGACACCCTGAAGGGCAGATT |
| | | CACCATCAGCCGGGACAACTCCAAGAACACCCT |
| | | GTACCTGCAGATGAACTCCCTGAGAGCCGAGGA |
| | | CACCGCCGTGTACTACTGTGCTAGAAGAGGCGA |
| | | GGGCGCCATGGATTATTGGGGCCAGGGAACCAC |
| | | AGTGACCGTGTCTAGC |

Antibody B-H.1C HC-3

| | | |
|---|---|---|
| SEQ ID NO: 17 | HC CDR1 (Combined) | GFTFSNFGMH |
| SEQ ID NO: 18 | HC CDR2 (Combined) | YISSGSSTIYYADTLKG |
| SEQ ID NO: 19 | HC CDR3 (Combined) | RGEGAMDY |
| SEQ ID NO: 23 | VH | QVQLVESGGGVVQPGRSLRLSCAASGFTFSNFGMH |
| | | WVRQAPGKGLEWVAYISSGSSTIYYADTLKGRFTIS |
| | | RDNSKNTLYLQMNSLRAEDTAVYYCARRGEGAM |
| | | DYWGQGTTVTVSS |
| SEQ ID NO: 33 | DNA VH | CAGGTGCAGCTGGTGGAATCTGGTGGCGGAGTT |
| | | GTGCAGCCTGGCAGATCCCTGAGACTGTCTTGTG |
| | | CCGCCTCTGGCTTCACCTTCTCCAACTTCGGCATG |
| | | CACTGGGTCCGACAGGCCCCTGGAAAAGGATTG |
| | | GAGTGGGTCGCCTACATCTCCTCCGGCTCCTCCA |
| | | CCATCTACTACGCTGACACCCTGAAGGGCAGATT |
| | | CACCATCAGCCGGGACAACTCCAAGAACACCCT |
| | | GTACCTGCAGATGAACTCCCTGAGAGCCGAGGA |
| | | CACCGCCGTGTACTACTGTGCTAGAAGAGGCGA |
| | | GGGCGCCATGGATTATTGGGGCCAGGGAACCAC |
| | | AGTGACCGTGTCTAGC |

Antibody B-H.1D LC-1

| | | |
|---|---|---|
| SEQ ID NO: 20 | LC CDR1 (Combined) | RASSSVNYIY |
| SEQ ID NO: 21 | LC CDR2 (Combined) | YTSNLAP |
| SEQ ID NO: 22 | LC CDR3 (Combined) | QQFTSSPFT |
| SEQ ID NO: 26 | VL | DNQLTQSPSFLSASVGDRVTITCRASSSVNYIYWYQ |
| | | QKPGKAPKLLIYYTSNLAPGVPSRFSGSGSGNEYTL |
| | | TISSLQPEDFATYYCQQFTSSPFTFGQGTKLEIK |
| SEQ ID NO: 34 | DNA VL | GATAACCAGCTGACCCAGTCTCCTAGCTTCCTGT |
| | | CTGCCTCTGTGGGCGACAGAGTGACAATTACCTG |
| | | CCGGGCCTCCTCCTCCGTGAACTACATCTACTGG |
| | | TATCAGCAGAAGCCCGGCAAGGCCCCTAAGCTG |
| | | TGCCCTCTAGATTTTCCGGATCTGGCTCCGGCAA |
| | | CGAGTATACCCTGACAATCTCCAGCCTGCAGCCT |
| | | GAGGACTTCGCCACCTACTACTGCCAGCAGTTCA |
| | | CCTCCTCTCCATTCACCTTTGGCCAGGGCACCAA |
| | | GCTGGAAATCAAA |

Antibody B-H.1E LC-2

| | | |
|---|---|---|
| SEQ ID NO: 20 | LC CDR1 (Combined) | RASSSVNYIY |
| SEQ ID NO: 21 | LC CDR2 (Combined) | YTSNLAP |
| SEQ ID NO: 22 | LC CDR3 (Combined) | QQFTSSPFT |
| SEQ ID NO: 27 | VL | DNQLTQSPSSLSASVGDRVTITCRASSSVNYIYWYQ |
| | | QKPGKAPKLLIYYTSNLAPGVPSRFSGSGSGNDYTL |
| | | TISSLQPEDFATYYCQQFTSSPFTFGQGTKLEIK |
| SEQ ID NO: 35 | DNA VL | ATAACCAGCTGACCCAGTCTCCTTCCAGCCTGTC |
| | | TGCTTCTGTGGGCGACAGAGTGACAATTACCTGC |
| | | CGGGCCTCCTCCTCCGTGAACTACATCTACTGGT |
| | | ATCAGCAGAAGCCCGGCAAGGCCCCTAAGCTGC |
| | | TGATCTACTACACCTCCAATCTGGCCCCTGGCGT |
| | | GCCCTCTAGATTTTCCGGATCTGGCTCCGGCAAC |
| | | GACTATACCCTGACAATCTCCAGCCTGCAGCCTG |
| | | AGGACTTCGCCACCTACTACTGCCAGCAGTTCAC |
| | | CTCCTCTCCATTCACCTTTGGCCAGGGCACCAAG |
| | | CTGGAAATCAAA |

Antibody B-H.1F C-3

| | | |
|---|---|---|
| SEQ ID NO: 20 | LC CDR1 (Combined) | RASSSVNYIY |
| SEQ ID NO: 21 | LC CDR2 (Combined) | YTSNLAP |
| SEQ ID NO: 22 | LC CDR3 (Combined) | QQFTSSPFT |
| SEQ ID NO: 28 | VL | ENVLTQSPATLSVSPGERATLSCRASSSVNYIYWYQ |
| | | QKPGQAPRLLIYYTSNLAPGIPARFSGSGSGNEYTL |
| | | TISSLQSEDFAVYYCQQFTSSPFTFGQGTKLEIK |
| SEQ ID NO: 36 | DNA VL | GAGAATGTGCTGACCCAGTCTCCTGCCACACTGT |
| | | CTGTTAGCCCTGGCGAGAGAGCTACCCTGAGCTG |
| | | CAGAGCCTCTTCCTCCGTGAACTACATCTACTGG |
| | | TATCAGCAGAAGCCCGGCCAGGCTCCTAGACTGC |
| | | TGATCTACTACACCTCCAATCTGGCCCCTGGCAT |
| | | CCCTGCCAGATTTTCCGGATCTGGCTCCGGCAAC |
| | | GAGTATACCCTGACCATCTCCAGCCTGCAGTCCG |
| | | AGGACTTTGCTGTGTACTATTGCCAGCAGTTCAC |
| | | AAGCAGCCCTTTCACCTTTGGCCAGGGCACCAAG |
| | | CTGGAAATCAAA |

Antibody B-H.1G LC-4

| | | |
|---|---|---|
| SEQ ID NO: 20 | LC CDR1 (Combined) | RASSSVNYIY |
| SEQ ID NO: 21 | LC CDR2 (Combined) | YTSNLAP |
| SEQ ID NO: 22 | LC CDR3 (Combined) | QQFTSSPFT |
| SEQ ID NO: 29 | VL | QNVLTQPPSASGTPGQRVTISCRASSSVNYIYWYQQ |
| | | LPGTAPKLLIYYTSNLAPGVPDRFSGSGSGNSYSLAI |
| | | SGLRSEDEADYYCQQFTSSPFTFGTGTKVTVL |
| SEQ ID NO: 37 | DNA VL | CAGAATGTGCTGACCCAACCTCCTTCCGCCTCTG |
| | | GCACACCTGGACAGAGAGTGACAATCTCCTGCC |
| | | GGGCCTCCTCCTCCGTGAACTACATCTACTGGTA |
| | | TCAGCAGCTGCCCGGCACCGCTCCTAAACTGCTG |
| | | ATCTACTACACCTCCAATCTGGCCCCTGGCGTGC |
| | | CCGATAGATTTTCCGGATCTGGCTCCGGCAACTC |
| | | CTACAGCCTGGCTATCTCTGGCCTGAGATCTGAG |
| | | GACGAGGCCGACTACTACTGCCAGCAGTTCACCT |
| | | CCTCTCCATTCACCTTTGGCACCGGCACCAAAGT |
| | | GACAGTTCTT |

Antibody B-H.1H LC-5

| | | |
|---|---|---|
| SEQ ID NO: 20 | LC CDR1 (Combined) | RASSSVNYIY |
| SEQ ID NO: 21 | LC CDR2 (Combined) | YTSNLAP |
| SEQ ID NO: 22 | LC CDR3 (Combined) | QQFTSSPFT |
| SEQ ID NO: 30 | VL | SNELTQPPSVSVSPGQTARITCRASSSVNYIYWYQQ |
| | | KSGQAPVLVIYYTSNLAPGIPERFSGSGSGNMYTLT |
| | | ISGAQVEDEADYYCQQFTSSPFTFGTGTKVTVL |
| SEQ ID NO: 38 | DNA VL | TCTAATGAGCTGACCCAGCCTCCTTCCGTGTCCG |
| | | TGTCTCCTGGACAGACCGCCAGAATTACCTGCCG |
| | | GGCCTCCTCCTCCGTGAACTACATCTACTGGTAT |
| | | CAGCAGAAGTCCGGCCAGGCTCCTGTGCTCGTGA |
| | | TCTACTACACCTCCAATCTGGCCCCTGGCATCCC |
| | | TGAGAGATTCTCCGGATCTGGCTCCGGCAACATG |
| | | TACACCCTGACCATCTCTGGCGCCCAGGTGGAAG |
| | | ATGAGGCCGACTACTACTGCCAGCAGTTCACCTC |
| | | CTCTCCATTCACCTTTGGCACCGGCACCAAAGTG |
| | | ACAGTTCTT |

Antibody B-H.1

| | | |
|---|---|---|
| SEQ ID NO: 3280 | Chain 1: Fc only | METDTLLLWVLLLWVPGSTGDKTHTCPPCPAPELL |
| | | GGPSVFLFPPKPKDTLMISRTPEVTCVVVDVSHEDP |
| | | EVKFNWYVDGVEVHNAKTKPREEQYNSTYRVVSV |
| | | LTVLHQDWLNGKEYKCKVSNKALPAPIEKTISKAK |
| | | GQPREPQVYTLPPCREEMTKNQVSLWCLVKGFYPS |
| | | DIAVEWESNGQPENNYKTTPPVLDSDGSFFLYSKLT |
| | | VDKSRWQQGNVFSCSVMHEALHNRFTQKSLSLSP |
| | | GK |
| SEQ ID NO: 3281 | Chain2: humanized B-H | METDTLLLWVLLLWVPGSTGEVQLVESGGGLVQP |
| | scFv | GGSLRLSCAASGFTFSNFGMHWVRQAPGKGLEWV |
| | | SYISSGSSTIYYADTLKGRFTISRDNSKNTLYLQMNS |
| | | LRAEDTAVYYCARRGEGAMDYWGQGTTVTVSSG |
| | | GGGSGGGGSGGGGSGGGGSDNQLTQSPSFLSASVG |
| | | DRVTITCRASSSVNYIYWYQQKPGKAPKLLIYYTSN |
| | | LAPGVPSRFSGSGSGNEYTLTISSLQPEDFATYYCQ |
| | | QFTSSPFTFGQGTKLEIKGGGGSDKTHTCPPCPAPE |
| | | LLGGPSVFLFPPKPKDTLMISRTPEVTCVVVDVSHE |
| | | DPEVKFNWYVDGVEVHNAKTKPREEQYNSTYRVV |
| | | SVLTVLHQDWLNGKEYKCKVSNKALPAPIEKTISK |
| | | AKGQPREPQVCTLPPSREEMTKNQVSLSCAVKGFY |
| | | PSDIAVEWESNGQPENNYKTTPPVLDSDGSFFLVSK |
| | | LTVDKSRWQQGNVFSCSVMHEALHNHYTQKSLSL |
| | | SPGKGGGGSGGGGSGLNDIFEAQKIEWHE |
| SEQ ID NO: 3642 | scFv | EVQLVESGGGLVQPGGSLRLSCAASGFTFSNFGMH |
| | | WVRQAPGKGLEWVSYISSGSSTIYYADTLKGRFTIS |
| | | RDNSKNTLYLQMNSLRAEDTAVYYCARRGEGAM |
| | | DYWGQGTTVTVSSGGGGSGGGGSGGGGSGGGGS |
| | | DNQLTQSPSFLSASVGDRVTITCRASSSVNYIYWYQ |
| | | QKPGKAPKLLIYYTSNLAPGVPSRFSGSGSGNEYTL |
| | | TISSLQPEDFATYYCQQFTSSPFTFGQGTKLEIK |

Antibody B-H.2

| | | |
|---|---|---|
| SEQ ID NO: 1338 | scFv | EVQLVESGGGLVQPGGSLRLSCAASGFTFSNFGMH |
| | | WVRQAPGKGLEWVSYISSGSSTIYYADTLKGRFTIS |
| | | RDNSKNTLYLQMNSLRAEDTAVYYCARRGEGAM |
| | | DYWGQGTTVTVSSGGGGSGGGGSGGGGSGGGGS |
| | | DNQLTQSPSSLSASVGDRVTITCRASSSVNYIYWYQ |
| | | QKPGKAPKLLIYYTSNLAPGVPSRFSGSGSGNDYTL |
| | | TISSLQPEDFATYYCQQFTSSPFTFGQGTKLEIK |

Antibody B-H.3

| | | |
|---|---|---|
| SEQ ID NO: 1339 | scFv | EVQLVESGGGLVQPGGSLRLSCAASGFTFSNFGMH |
| | | WVRQAPGKGLEWVSYISSGSSTIYYADTLKGRFTIS |
| | | RDNSKNTLYLQMNSLRAEDTAVYYCARRGEGAM |
| | | DYWGQGTTVTVSSGGGGSGGGGSGGGGSGGGGSS |
| | | NELTQPPSVSVSPGQTARITCRASSSVNYIYWYQQK |
| | | SGQAPVLVIYYTSNLAPGIPERFSGSGSGNMYTLTIS |
| | | GAQVEDEADYYCQQFTSSPFTFGTGTKVTVL |

Antibody B-H.4

| | | |
|---|---|---|
| SEQ ID NO: 1340 | scFv | QVQLVESGGGVVQPGRSLRLSCAASGFTFSNFGMH |
| | | WVRQAPGKGLEWVAYISSGSSTIYYADTLKGRFTIS |
| | | RDNSKNTLYLQMNSLRAEDTAVYYCARRGEGAM |
| | | DYWGQGTTVTVSSGGGGSGGGGSGGGGSGGGGS |
| | | DNQLTQSPSFLSASVGDRVTITCRASSSVNYIYWYQ |
| | | QKPGKAPKLLIYYTSNLAPGVPSRFSGSGSGNEYTL |
| | | TISSLQPEDFATYYCQQFTSSPFTFGQGTKLEIK |

Antibody B-H.5

| | | |
|---|---|---|
| SEQ ID NO: 1341 | scFv | QVQLVESGGGVVQPGRSLRLSCAASGFTFSNFGMH |
| | | WVRQAPGKGLEWVAYISSGSSTIYYADTLKGRFTIS |
| | | RDNSKNTLYLQMNSLRAEDTAVYYCARRGEGAM |
| | | DYWGQGTTVTVSSGGGGSGGGGSGGGGSGGGGS |
| | | DNQLTQSPSSLSASVGDRVTITCRASSSVNYIYWYQ |
| | | QKPGKAPKLLIYYTSNLAPGVPSRFSGSGSGNDYTL |
| | | TISSLQPEDFATYYCQQFTSSPFTFGQGTKLEIK |

Antibody B-H.6

| | | |
|---|---|---|
| SEQ ID NO: 1342 | scFv | QVQLVESGGGVVQPGRSLRLSCAASGFTFSNFGMH |
| | | WVRQAPGKGLEWVAYISSGSSTIYYADTLKGRFTIS |
| | | RDNSKNTLYLQMNSLRAEDTAVYYCARRGEGAM |
| | | DYWGQGTTVTVSSGGGGSGGGGSGGGGSGGGGSS |
| | | NELTQPPSVSVSPGQTARITCRASSSVNYIYWYQQK |
| | | SGQAPVLVIYYTSNLAPGIPERFSGSGSGNMYTLTIS |
| | | GAQVEDEADYYCQQFTSSPFTFGTGTKVTVL |

TABLE 3
Constant region amino acid sequences of human
IgG heavy chains and human kappa light chain

| | | |
|---|---|---|
| Human kappa | LC | RTVAAPSVFI FPPSDEQLKS GTASVVCLLN NFYPREAKVQ |
| constant region | | WKVDNALQSG NSQESVTEQD SKDSTYSLSS TLTLSKADYE |
| SEQ ID NO: 39 | | KHKVYACEVT HQGLSSPVTK SFNRGEC |
| IgG4 (S228P) | HC | ASTKGPSVFPLAPCSRSTSESTAALGCLVKDYFPEPVTVSWNSGALTSG |
| mutant constant | | VHTFPAVLQSSGLYSLSSVVTVPSSSLGTKTYTCNVDHKPSNTKVDKR |
| region (EU | | VESKYGPPCPPCPAPEFLGGPSVFLFPPKPKDTLMISRTPEVTCVVVD |
| Numbering) | | VSQEDPEVQFNWYVDGVEVHNAKTKPREEQFNSTYRVVSVLTVLHQDW |
| SEQ ID NO: 40 | | LNGKEYKCKVSNKGLPSSIEKTISKAKGQPREPQVYTLPPSQEEMTKNQ |
| | | VSLTCLVKGFYPSDIAVEWESNGQPENNYKTTPPVLDSDGSFFLYSRLT |
| | | VDKSRWQEGNVFSCSVMHEALHNHYTQKSLSLSLG |
| IgG1 wild type | HC | ASTKGPSVFPLAPSSKSTSGGTAALGCLVKDYFPEPVTVSWNSGALTSG |
| SEQ ID NO: 41 | | VHTFPAVLQSSGLYSLSSVVTVPSSSLGTQTYICNVNHKPSNTKVDKRV |
| | | EPKSCDKTHTCPPCPAPELLGGPSVFLFPPKPKDTLMISRTPEVTCVVVD |
| | | VSHEDPEVKFNWYVDGVEVHNAKTKPREEQYNSTYRVVSVLTVLHQ |
| | | DWLNGKEYKCKVSNKALPAPIEKTISKAKGQPREPQVYTLPPSREEMT |
| | | KNQVSLTCLVKGFYPSDIAVEWESNGQPENNYKTTPPVLDSDGSFFLY |
| | | SKLTVDKSRWQQGNVFSCSVMHEALHNHYTQKSLSLSPGK |
| IgG1 (N297A) | HC | ASTKGPSVFPLAPSSKSTSGGTAALGCLVKDYFPEPVTVSWNSGALTSG |
| mutant constant | | VHTFPAVLQSSGLYSLSSVVTVPSSSLGTQTYICNVNHKPSNTKVDKRV |
| region (EU | | EPKSCDKTHTCPPCPAPELLGGPSVFLFPPKPKDTLMISRTPEVTCVVVD |
| Numbering) | | VSHEDPEVKFNWYVDGVEVHNAKTKPREEQYASTYRVVSVLTVLHQ |
| SEQ ID NO: 42 | | DWLNGKEYKCKVSNKALPAPIEKTISKAKGQPREPQVYTLPPSREEMT |
| | | KNQVSLTCLVKGFYPSDIAVEWESNGQPENNYKTTPPVLDSDGSFFLY |
| | | SKLTVDKSRWQQGNVFSCSVMHEALHNHYTQKSLSLSPGK |
| IgM constant | HC | GSASAPTLFPLVSCENSPSDTSSVAVGCLAQDFLPDSITFSWKYKNNS |
| delta CDC | | DISSTRGFPSVLRGGKYAATSQVLLPSKDVMQGTDEHVVCKVQHPNGNK |
| (P311A, P313S) | | EKNVPLPVIAELPPKVSVFVPPRDGFFGNPRKSKLICQATGFSPRQIQ |
| SEQ ID NO: 73 | | VSWLREGKQVGSGVTTDQVQAEAKESGPTTYKVTSTLTIKESDWLGQSM |
| | | FTCRVDHRGLTFQQNASSMCVPDQDTAIRVFAIPPSFASIFLTKSTKLT |
| | | CLVTDLTTYDSVTISWTRQNGEAVKTHTNISESHPNATFSAVGEASICE |
| | | DDWNSGERFTCTVTHTDLASSLKQTISRPKGVALHRPDVYLLPPAREQL |
| | | NLRESATITCLVTGFSPADVFVQWMQRGQPLSPEKYVTSAPMPEPQAP |
| | | GRYFAHSILTVSEEEWNTGETYTCVVAHEALPNRVTERTVDKSTGKPT |
| | | LYNVSLVMSDTAGTCY |
| IgGA1 | HC | ASPTSPKVFPLSLCSTQPDGNVVIACLVQGFFPQEPLSVTWSESGQGVT |
| SEQ ID NO: 74 | | ARNFPPSQDASGDLYTTSSQLTLPATQCLAGKSVTCHVKHYTNPSQDVT |
| | | VPCPVPSTPPTPSPSTPPTPSPSCCHPRLSLHRPALEDLLLGSEANLTC |
| | | TLTGLRDASGVTFTWTPSSGKSAVQGPPERDLCGCYSVSSVLPGCAEPW |
| | | NHGKTFTCTAAYPESKTPLTATLSKSGNTFRPEVHLLPPPSEELALNEL |
| | | VTLTCLARGFSPKDVLVRWLQGSQELPREKYLTWASRQEPSQGTTTFA |
| | | VTSILRVAAEDWKKGDTFSCMVGHEALPLAFTQKTIDRLAGKPTHVN |
| | | VSVVMAEVDGTCY |
| IgGA2 | HC | ASPTSPKVFPLSLDSTPQDGNVVVACLVQGFFPQEPLSVTWSESGQNV |
| SEQ ID NO: 75 | | TARNFPPSQDASGDLYTTSSQLTLPATQCPDGKSVTCHVKHYTNSSQD |
| | | VTVPCRVPPPPPCCHPRLSLHRPALEDLLLGSEANLTCTLTGLRDASG |
| | | ATFTWTPSSGKSAVQGPPERDLCGCYSVSSVLPGCAQPWNHGETFTCT |
| | | AAHPELKTPLTANITKSGNTFRPEVHLLPPPSEELALNELVTLTCLAR |
| | | GFSPKDVLVRWLQGSQELPREKYLTWASRQEPSQGTTTYAVTSILRVA |
| | | AEDWKKGETFSCMVGHEALPLAFTQKTIDRMAGKPTHINVSVVMAEAD |
| | | GTCY |
| Human Ig_J | HC | MKNHLLFWGVLAVFIKAVHVKAQEDERIVLVDNKCKCARITSRIIRSSE |
| chain | | DPNEDIVERNIRIIVPLNNRENISDPTSPLRTRFVYHLSDLCKKCDPTE |
| SEQ ID NO: 76 | | VELDNQIVTATQSNICDEDSATETCYTYDRNKCYTAVVPLVYGGETKMV |
| | | ETALTPDACYPD |

### Anti-TCRβ V5 Antibodies

[0807] Accordingly, in one aspect, the disclosure provides an anti-TCRβV antibody molecule that binds to human TCRβ V5. In some embodiments, the TCRβ V5 subfamily comprises TCRβ V5-5*01, TCRβ V5-6*01, TCRβ V5-4*01, TCRβ V5-8*01, TCRβ V5-1*01, or a variant thereof.

[0808] Exemplary anti-TCRβ V5 antibodies of the disclosure are provided in Table 10. In some embodiments, the anti-TCRβ V5 is antibody C, e.g., humanized antibody C (antibody C-H), as provided in Table 10. In some embodiments, the anti-TCRβV antibody comprises one or more (e.g., all three) of a LC CDR1, LC CDR2, and LC CDR3 provided in Table 10; and/or one or more (e.g., all three) of a HC CDR1, HC CDR2, and HC CDR3 provided in Table 10, or a sequence with at least 95% identity thereto. In some embodiments, antibody C comprises a variable heavy chain (VH) and/or a variable light chain (VL) provided in Table 10, or a sequence with at least 95% identity thereto.

TABLE 10
Amino acid sequences for anti TCRβ V5 antibodies
Amino acid and nucleotide sequences for murine and humanized antibody molecules which bind to
TCRVB 5 (e.g., TCRVB 5-5 or TCRVB 5-6). The amino acid the heavy and light chain CDRs, and
the amino acid and nucleotide sequences of the heavy and light chain variable regions, and the
heavy and light chains are shown.
Murine antibody C, also referred to as 4H11

| | | |
|---|---|---|
| SEQ ID NO: 1315 | HC CDR1 (Kabat) | AYGVN |
| SEQ ID NO: 1316 | HC CDR2 (Kabat) | MIWGDGNTDYNSALKS |
| SEQ ID NO: 1317 | HC CDR3 (Kabat) | DRVTATLYAMDY |
| SEQ ID NO: 1318 | HC CDR1 (Chothia) | GFSLTAY |
| SEQ ID NO: 1319 | HC CDR2 (Chothia) | WGDGN |
| SEQ ID NO: 1317 | HC CDR3 (Chothia) | DRVTATLYAMDY |
| SEQ ID NO: 1320 | HC CDR1 (Combined) | GFSLTAYGVN |
| SEQ ID NO: 1316 | HC CDR2 (Combined) | MIWGDGNTDYNSALKS |
| SEQ ID NO: 1317 | HC CDR3(Combined) | DRVTATLYAMDY |
| SEQ ID NO: 1321 | LC CDR1 (Kabat) | SASQGISNYLN |
| SEQ ID NO: 1322 | LC CDR2 (Kabat) | YTSSLHS |
| SEQ ID NO: 1323 | LC CDR3 (Kabat) | QQYSKLPRT |
| SEQ ID NO: 1321 | LC CDR1 (Chothia) | SASQGISNYLN |
| SEQ ID NO: 1322 | LC CDR2 (Chothia) | YTSSLHS |
| SEQ ID NO: 1323 | LC CDR3 (Chothia) | QQYSKLPRT |
| SEQ ID NO: 1321 | LC CDR1 (Combined) | SASQGISNYLN |
| SEQ ID NO: 1322 | LC CDR2 (Combined) | YTSSLHS |
| SEQ ID NO: 1323 | LC CDR3(Combined) | QQYSKLPRT |
| SEQ ID NO: 232 | VH | DIQMTQTTSSLSASLGDRVTISCSASQGISNYLNW |
| | | YQQKPDGTVKLLIYYTSSLHSGVPSRFSGSGSGTD |
| | | YSLTISNLEPEDIATYYCQQYSKLPRTFGGGTKVE |
| | | IK |
| SEQ ID NO: 233 | VL | QVQLKESGPGLVAPSQSLSITCTVSGFSLTAYGVN |
| | | WVRQPPGKGLEWLGMIWGDGNTDYNSALKSRL |
| | | SISKDNSKSQVFLKMNSLQTDDTARYYCARDRV |
| | | TATLYAMDYWGQGTSVTVSS |

Humanized antibody C
C-H-1 antibody

| | | |
|---|---|---|
| SEQ ID NO: 1315 | HC CDR1 (Kabat) | AYGVN |
| SEQ ID NO: 1316 | HC CDR2 (Kabat) | MIWGDGNTDYNSALKS |
| SEQ ID NO: 1317 | HC CDR3 (Kabat) | DRVTATLYAMDY |
| SEQ ID NO: 1318 | HC CDR1 (Chothia) | GFSLTAY |
| SEQ ID NO: 1319 | HC CDR2 (Chothia) | WGDGN |
| SEQ ID NO: 1317 | HC CDR3 (Chothia) | DRVTATLYAMDY |
| SEQ ID NO: 1320 | HC CDR1 (Combined) | GFSLTAYGVN |
| SEQ ID NO: 1316 | HC CDR2 (Combined) | MIWGDGNTDYNSALKS |
| SEQ ID NO: 1317 | HC CDR3 (Combined) | DRVTATLYAMDY |
| SEQ ID NO: 1321 | LC CDR1 (Kabat) | SASQGISNYLN |
| SEQ ID NO: 1322 | LC CDR2 (Kabat) | YTSSLHS |
| SEQ ID NO: 1323 | LC CDR3 (Kabat) | QQYSKLPRT |
| SEQ ID NO: 1321 | LC CDR1 (Chothia) | SASQGISNYLN |
| SEQ ID NO: 1322 | LC CDR2 (Chothia) | YTSSLHS |
| SEQ ID NO: 1323 | LC CDR3 (Chothia) | QQYSKLPRT |
| SEQ ID NO: 1321 | LC CDR1 (Combined) | SASQGISNYLN |
| SEQ ID NO: 1322 | LC CDR2 (Combined) | YTSSLHS |
| SEQ ID NO: 1323 | LC CDR3 (Combined) | QQYSKLPRT |
| SEQ ID NO: 1324 | VL | DIQMTQSPSSLSASVGDRVTITCSASQGISNYLNW |
| | | YQQTPGKAPKLLIYYTSSLHSGVPSRFSGSGSGTD |
| | | YTFTISSLQPEDIATYYCQQYSKLPRTFGQGTKLQ |
| | | IT |
| SEQ ID NO: 1325 | VH | QVQLQESGPGLVRPSQTLSLTCTVSGFSLTAYGV |
| | | NWVRQPPGRGLEWLGMIWGDGNTDYNSALKSR |
| | | VTMLKDTSKNQFSLRLSSVTAADTAVYYCARDR |
| | | VTATLYAMDYWGQGSLVTVSS |

Humanized antibody C Variable light chain (VL)

| | | | |
|---|---|---|---|
| SEQ ID | VL | C-H- | DIQMTQSPSFLSASVGDRVTITCSASQGISNYLNWYQQKPGKAVKL |
| NO: 3000 | | VL.1 | LIYYTSSLHSGVPSRFSGSGSGTEYTLTISSLQPEDFATYYCQQYS |
| | | | KLPRTFGGGTKVEIK |
| SEQ ID | VL | C-H- | DIQMTQSPSSLSASVGDRVTITCSASQGISNYLNWYQQKPGKAVKL |
| NO: 3001 | | VL.2 | LIYYTSSLHSGVPSRFSGSGSGTDYTLTISSLQPEDFATYYCQQYS |
| | | | KLPRTFGGGTKVEIK |
| SEQ ID | VL | C-H- | DIQMTQSPSSLSASVGDRVTITCSASQGISNYLNWYQQKPGKVVKL |
| NO: 3002 | | VL.3 | LIYYTSSLHSGVPSRFSGSGSGTDYTLTISSLQPEDVATYYCQQYS |
| | | | KLPRTFGGGTKVEIK |
| SEQ ID | VL | C-H- | DIQMTQSPSSLSASVGDRVTITCSASQGISNYLNWYQQKPGQAVKL |
| NO: 3003 | | VL.4 | LIYYTSSLHSGVPSRFSGSGSGTDYTLTISSLQPEDVATYYCQQYS |
| | | | KLPRTFGGGTKVEIK |
| SEQ ID | VL | C-H- | DIQMTQSPSSLSASVGDRVTITCSASQGISNYLNWYQQKPGKAVKL |
| NO: 3004 | | VL.5 | LIYYTSSLHSGVPSRFSGSGSGTDYTFTISSLQPEDIATYYCQQYSK |
| | | | LPRTFGGGTKVEIK |
| SEQ ID | VL | C-H- | DIQMTQSPSSLSASVGDRVTITCSASQGISNYLNWYQQKPGKTVKLL |
| NO: 3005 | | VL.6 | IYYTSSLHSGIPSRFSGSGSGTDYTLTIRSLQPEDFATYYCQQYSKLP |
| | | | RTFGGGTKVEIK |
| SEQ ID | VL | C-H- | AIQMTQSPSSLSASVGDRVTITCSASQGISNYLNWYQQKPGKAVKL |
| NO: 3006 | | VL.7 | LIYYTSSLHSGVPSRFSGSGSGTDYTLTISSLQPEDFATYYCQQYSKL |
| | | | PRTFGGGTKVEIK |
| SEQ ID | VL | C-H- | DIQMTQSPSSVSASVGDRVTITCSASQGISNYLNWYQQKPGKAVKL |
| NO: 3007 | | VL.8 | LIYYTSSLHSGVPSRFSGSGSGTDYTLTISSLQPEDFATYYCQQYSKL |
| | | | PRTFGGGTKVEIK |
| SEQ ID | VL | C-H- | DIQMTQSPSSLSASVGDRVTITCSASQGISNYLNWYQQKPGKAVKR |
| NO: 3008 | | VL.9 | LIYYTSSLHSGVPSRFSGSGSGTEYTLTISNLQPEDFATYYCQQYSKL |
| | | | PRTFGGGTKVEIK |
| SEQ ID | VL | C-H- | AIRMTQSPFSLSASVGDRVTITCSASQGISNYLNWYQQKPAKAVKLF |
| NO: 3009 | | VL.10 | IYYTSSLHSGVPSRFSGSGSGTDYTLTISSLQPEDFATYYCQQYSKLP |
| | | | RTFGGGTKVEIK |
| SEQ ID | VL | C-H- | DIQMTQSPSSLSASVGDRVTITCSASQGISNYLNWYQQKPGKAVKR |
| NO: 3010 | | VL.11 | LIYYTSSLHSGVPSRFSGSGSGTEYTLTISSLQPEDFATYYCQQYSKL |
| | | | PRTFGGGTKVEIK |
| SEQ ID | VL | C-H- | DIQMTQSPSTLSASVGDRVTITCSASQGISNYLNWYQQKPGKAVKL |
| NO: 3011 | | VL.12 | LIYYTSSLHSGVPSRFSGSGSGTEYTLTISSLQPDDFATYYCQQYSKL |
| | | | PRTFGGGTKVEIK |
| SEQ ID | VL | C-H- | DIQMTQSPSSLSASVGDRVTITCSASQGISNYLNWYQQKPGKAVKSL |
| NO:3012 | | VL.13 | IYYTSSLHSGVPSRFSGSGSGTDYTLTISSLQPEDFATYYCQQYSKLP |
| | | | RTFGGGTKVEIK |
| SEQ ID | VL | C-H- | DIQMTQSPSSLSASVGDRVTITCSASQGISNYLNWYQQKPGKAVKSL |
| NO: 3013 | | VL.14 | IYYTSSLHSGVPSKFSGSGSGTDYTLTISSLQPEDFATYYCQQYSKLP |
| | | | RTFGGGTKVEIK |
| SEQ ID | VL | C-H- | DIQMTQSPSSLSASVGDRVTITCSASQGISNYLNWYQQKPEKAVKSL |
| NO: 3014 | | VL.15 | IYYTSSLHSGVPSRFSGSGSGTDYTLTISSLQPEDFATYYCQQYSKLP |
| | | | RTFGGGTKVEIK |
| SEQ ID | VL | C-H- | DIQMTQSPSAMSASVGDRVTITCSASQGISNYLNWYQQKPGKVVKR |
| NO: 3015 | | VL.16 | LIYYTSSLHSGVPSRFSGSGSGTEYTLTISSLQPEDFATYYCQQYSKL |
| | | | PRTFGGGTKVEIK |
| SEQ ID | VL | C-H- | DIVMTQSPDSLAVSLGERATINCSASQGISNYLNWYQQKPGQPVKL |
| NO: 3016 | | VL.17 | LIYYTSSLHSGVPDRFSGSGSGTDYTLTISSLQAEDVAVYYCQQYSK |
| | | | LPRTFGGGTKVEIK |
| SEQ ID | VL | C-H- | EIVMTQSPGTLSLSPGERATLSCSASQGISNYLNWYQQKPGQAVKLL |
| NO: 3017 | | VL.18 | IYYTSSLHSGIPDRFSGSGSGTDYTLTISRLEPEDFAVYYCQQYSKLP |
| | | | RTFGGGTKVEIK |
| SEQ ID | VL | C-H- | EIVMTQSPPTLSLSPGERVTLSCSASQGISNYLNWYQQKPGQAVKLL |
| NO: 3018 | | VL.19 | IYYTSSLHSGIPARFSGSGSGTDYTLTISSLQPEDFAVYYCQQYSKLP |
| | | | RTFGGGTKVEIK |
| SEQ ID | VL | C-H- | EIVMTQSPPTLSLSPGERVTLSCSASQGISNYLNWYQQKPGQAVKLL |
| NO: 3019 | | VL.20 | IYYTSSLHSSIPARFSGSGSGTDYTLTISSLQPEDFAVYYCQQYSKLP |
| | | | RTFGGGTKVEIK |
| SEQ ID | VL | C-H- | EIVMTQSPATLSLSPGERATLSCSASQGISNYLNWYQQKPGQAVKLL |
| NO: 3020 | | VL.21 | IYYTSSLHSGIPARFSGSGSGTDYTLTISSLEPEDFAVYYCQQYSKLP |
| | | | RTFGGGTKVEIK |
| SEQ ID | VL | C-H- | EIVMTQSPATLSLSPGERATLSCSASQGISNYLNWYQQKPGQAVKLL |
| NO: 3021 | | VL.22 | IYYTSSLHSGIPARFSGSGSGTDYTLTISRLEPEDFAVYYCQQYSKLP |
| | | | RTFGGGTKVEIK |
| SEQ ID | VL | C-H- | EIVMTQSPATLSLSPGERATLSCSASQGISNYLNWYQQKPGQAVKLL |
| NO: 3022 | | VL.23 | IYYTSSLHSGIPDRFSGSGSGTDYTLTISRLEPEDFAVYYCQQYSKLP |
| | | | RTFGGGTKVEIK |
| SEQ ID | VL | C-H- | EIVMTQSPATLSLSPGERATLSCSASQGISNYLNWYQQKPGLAVKLL |
| NO: 3023 | | VL.24 | IYYTSSLHSGIPDRFSGSGSGTDYTLTISRLEPEDFAVYYCQQYSKLP |
| | | | RTFGGGTKVEIK |
| SEQ ID | VL | C-H- | DIQMIQSPSFLSASVGDRVSIICSASQGISNYLNWYLQKPGKSVKLFI |
| NO: 3024 | | VL.25 | YYTSSLHSGVSSRFSGRGSGTDYTLTIISLKPEDFAAYYCQQYSKLPR |
| | | | TFGGGTKVEIK |
| SEQ ID | VL | C-H- | EIVMTQSPATLSLSPGERATLSCSASQGISNYLNWYQQKPGQAVKLL |
| NO: 3025 | | VL.26 | IYYTSSLHSGIPARFSGSGSGTDYTLTISSLQPEDFAVYYCQQYSKLP |
| | | | RTFGGGTKVEIK |
| SEQ ID | VL | C-H- | EIVMTQSPATLSLSPGERATLSCSASQGISNYLNWYQQKPGQAVKLL |
| NO: 3026 | | VL.27 | IYYTSSLHSGIPARFSGSGPGTDYTLTISSLEPEDFAVYYCQQYSKLP |
| | | | RTFGGGTKVEIK |
| SEQ ID | VL | C-H- | DIVMTQTPLSLSVTPGQPASISCSASQGISNYLNWYLQKPGQSVKLLI |
| NO: 3027 | | VL.28 | YYTSSLHSGVPDRFSGSGSGTDYTLKISRVEAEDVGVYYCQQYSKL |
| | | | PRTFGGGTKVEIK |
| SEQ ID | VL | C-H- | DIVMTQTPLSLSVTPGQPASISCSASQGISNYLNWYLQKPGQPVKLLI |
| NO: 3028 | | VL.29 | YYTSSLHSGVPDRFSGSGSGTDYTLKISRVEAEDVGVYYCQQYSKL |
| | | | PRTFGGGTKVEIK |
| SEQ ID | VL | C-H- | DIVMTQSPAFLSVTPGEKVTITCSASQGISNYLNWYQQKPDQAVKL |
| NO: 3029 | | VL.30 | LIYYTSSLHSGVPSRFSGSGSGTDYTFTISSLEAEDAATYYCQQYSKL |
| | | | PRTFGGGTKVEIK |
| SEQ ID | VL | C-H- | DIVMTQSPLSLPVTPGEPASISCSASQGISNYLNWYLQKPGQSVKLLI |
| NO: 3030 | | VL.31 | YYTSSLHSGVPDRFSGSGSGTDYTLKISRVEAEDVGVYYCQQYSKL |
| | | | PRTFGGGTKVEIK |
| SEQ ID | VL | C-H- | DIVMTQTPLSLPVTPGEPASISCSASQGISNYLNWYLQKPGQSVKLLI |
| NO: 3031 | | VL.32 | YYTSSLHSGVPDRFSGSGSGTDYTLKISRVEAEDVGVYYCQQYSKL |
| | | | PRTFGGGTKVEIK |
| SEQ ID | VL | C-H- | EIVMTQSPATLSVSPGERATLSCSASQGISNYLNWYQQKPGQAVKL |
| NO: 3032 | | VL.33 | LIYYTSSLHSGIPARFSGSGSGTEYTLTISILQSEDFAVYYCQQYSK |
| | | | LPRTFGGGTKVEIK |
| SEQ ID | VL | C-H- | EIVMTQSPATLSVSPGERATLSCSASQGISNYLNWYQQKPGQAVKL |
| NO: 3033 | | VL.34 | LIYYTSSLHSGIPARFSGSGSGTEYTLTISSLQSEDFAVYYCQQYSKL |
| | | | PRTFGGGTKVEIK |
| SEQ ID | VL | C-H- | DIVMTQSPLSLPVTLGQPASISCSASQGISNYLNWYQQRPGQSVKRLI |
| NO: 3034 | | VL.35 | YYTSSLHSGVPDRFSGSGSGTDYTLKISRVEAEDVGVYYCQQYSKL |
| | | | PRTFGGGTKVEIK |
| SEQ ID | VL | C-H- | EITMTQSPAFMSATPGDKVNISCSASQGISNYLNWYQQKPGEAVKFI |
| NO: 3035 | | VL.36 | IYYTSSLHSGIPPRFSGSGYGTDYTLTINNIESEDAAYYYCQQYSKLP |
| | | | RTFGGGTKVEIK |
| SEQ ID | VL | C-H- | DIVMTQTPLSSPVTLGQPASISCSASQGISNYLNWYQQRPGQPVKLLI |
| NO: 3036 | | VL.37 | YYTSSLHSGVPDRFSGSGAGTDYTLKISRVEAEDVGVYYCQQYSKL |
| | | | PRTFGGGTKVEIK |
| SEQ ID | VL | C-H- | EIVMTQSPDFQSVTPKEKVTITCSASQGISNYLNWYQQKPDQSVKLL |
| NO: 3037 | | VL.38 | IYYTSSLHSGVPSRFSGSGSGTDYTLTINSLEAEDAATYYCQQYSKLP |
| | | | RTFGGGTKVEIK |
| SEQ ID | VL | C-H- | EIVMTQTPLSLSITPGEQASISCSASQGISNYLNWYLQKARPVVKLLI |
| NO: 3038 | | VL.39 | YYTSSLHSGVPDRFSGSGSGTDYTLKISRVEAEDFGVYYCQQYSKLP |
| | | | RTFGGGTKVEIK |
| SEQ ID | VL | C-H- | EIVMTQTPLSLSITPGEQASMSCSASQGISNYLNWYLQKARPVVKLL |
| NO: 3039 | | VL.40 | IYYTSSLHSGVPDRFSGSGSGTDYTLKISRVEAEDFGVYYCQQYSKL |
| | | | PRTFGGGTKVEIK |

Humanized antibody C Variable HEAVY chain (VH)

| | | | |
|---|---|---|---|
| SEQ ID | VH | C-H- | QVTLKESGPVLVKPTETLTLTCTVSGFSLTAYGVNWVRQPPGKALE |
| NO: 3040 | | VH.1 | WLGMIWGDGNTDYNSALKSRLTISKDNSKSQVVLTMTNMDPVDT |
| | | | ATYYCARDRVTATLYAMDYWGQGTLVTVSS |
| SEQ ID | VH | C-H- | QVTLKESGPALVKPTETLTLTCTVSGFSLTAYGVNWVRQPPGKALE |
| NO: 3041 | | VH.2 | WLGMIWGDGNTDYNSALKSRLIISKDNSKSQVVLTMTNMDPVDTA |
| | | | TYYCARDRVTATLYAMDYWGQGTLVTVSS |
| SEQ ID | VH | C-H- | QVTLKESGPALVKPTQTLTLTCTVSGFSLTAYGVNWVRQPPGKALE |
| NO: 3042 | | VH.3 | WLGMIWGDGNTDYNSALKSRLTISKDNSKSQVVLTMTNMDPVDT |
| | | | ATYYCARDRVTATLYAMDYWGQGTLVTVSS |
| SEQ ID | VH | C-H- | QVQLQESGPGLVKPSGTLSLTCAVSGFSLTAYGVNWVRQPPGKGLE |
| NO: 3043 | | VH.4 | WLGMIWGDGNTDYNSALKSRLTISKDNSKSQVSLKLSSVTAADTA |
| | | | VYYCARDRVTATLYAMDYWGQGTLVTVSS |
| SEQ ID | VH | C-H- | QVTLKESGPTLVKPTQTLTLTCTVSGFSLTAYGVNWVRQPPGKALE |
| NO: 3044 | | VH.5 | WLGMIWGDGNTDYNSALKSRLTITKDNSKSQVVLTMTNMDPVDT |
| | | | ATYYCARDRVTATLYAMDYWGQGTLVTVSS |
| SEQ ID | VH | C-H- | QVTLKESGPALVKPTQTLTLTCTVSGFSLTAYGVNWVRQPPGKALE |
| NO: 3045 | | VH.6 | WLGMIWGDGNTDYNSALKSRLTITKDNSKSQVVLTMTNMDPVDT |
| | | | ATYYCARDRVTATLYAMDYWGQGTLVTVSS |
| SEQ ID | VH | C-H- | QVQLQESGPGLVKPSQTLSLTCTVSGFSLTAYGVNWVRQPPGKGLE |
| NO: 3046 | | VH.7 | WLGMIWGDGNTDYNSALKSRLTISKDNSKSQVSLKLSSVTAADTA |
| | | | VYYCARDRVTATLYAMDYWGQGTLVTVSS |
| SEQ ID | VH | C-H- | QVQLQESGPGLVKPSETLSLTCTVSGFSLTAYGVNWVRQPPGKGLE |
| NO: 3047 | | VH.8 | WLGMIWGDGNTDYNSALKSRLTISKDNSKSQVSLKLSSVTAADTA |
| | | | VYYCARDRVTATLYAMDYWGQGTLVTVSS |
| SEQ ID | VH | C-H- | QVQLQESGPGLVKPSQTLSLTCAVSGFSLTAYGVNWVRQPPGKGLE |
| NO: 3048 | | VH.9 | WLGMIWGDGNTDYNSALKSRLTISKDNSKSQVSLKLSSVTAADTA |
| | | | VYYCARDRVTATLYAMDYWGQGTLVTVSS |
| SEQ ID | VH | C-H- | QVQLQESGPGLVKPSDTLSLTCTVSGFSLTAYGVNWVRQPPGKGLE |
| NO: 3049 | | VH.10 | WLGMIWGDGNTDYNSALKSRLTISKDNSKSQVSLKLSSVTAADTA |
| | | | VYYCARDRVTATLYAMDYWGQGTLVTVSS |
| SEQ ID | VH | C-H- | QVQLQESGPGLVKPSQTLSLTCTVSGFSLTAYGVNWVRQHPGKGLE |
| NO: 3050 | | VH.11 | WLGMIWGDGNTDYNSALKSRLTISKDNSKSQVSLKLSSVTAADTA |
| | | | VYYCARDRVTATLYAMDYWGQGTLVTVSS |
| SEQ ID | VH | C-H- | QVQLQESGPGLVKPSQTLSLTCTVSGFSLTAYGVNWVRQPAGKGLE |
| NO: 3051 | | VH.12 | WLGMIWGDGNTDYNSALKSRLTISKDNSKSQVSLKLSSVTAADTA |
| | | | VYYCARDRVTATLYAMDYWGQGTLVTVSS |
| SEQ ID | VH | C-H- | QVQLQESGPGLVKPSQTLSLTCAVSGFSLTAYGVNWVRQPPGKGLE |
| NO: 3052 | | VH.13 | WLGMIWGDGNTDYNSALKSRLTISKDNSKSQVSLKLSSVTAVDTA |
| | | | VYYCARDRVTATLYAMDYWGQGTLVTVSS |
| SEQ ID | VH | C-H- | QVQLQESGPGLVKPSETLSLTCTVSGFSLTAYGVNWVRQPPGKGLE |
| NO: 3053 | | VH.14 | WLGMIWGDGNTDYNSALKSRLTISKDNSKSHVSLKLSSVTAADTA |
| | | | VYYCARDRVTATLYAMDYWGQGTLVTVSS |
| SEQ ID | VH | C-H- | QVQLQESGPGLVKPSETLSLTCAVSGFSLTAYGVNWVRQPPGKGLE |
| NO: 3054 | | VH15 | WLGMIWGDGNTDYNSALKSRLTISKDNSKSQVSLKLSSVTAADTA |
| | | | VYYCARDRVTATLYAMDYWGQGTLVTVSS |
| SEQ ID | VH | C-H- | QVQLQESGPGLVKPSQTLSLTCAVYGFSLTAYGVNWVRQPPGKGL |
| NO: 3055 | | VH16 | EWLGMIWGDGNTDYNSALKSRLTISKDNSKSQVSLKLSSVTAADTA |
| | | | VYYCARDRVTATLYAMDYWGQGTLVTVSS |
| SEQ ID | VH | C-H- | RVQLQESGPGLVKPSETLSLTCTVSGFSLTAYGVNWVRQPPGKGLE |
| NO: 3056 | | VH.17 | WLGMIWGDGNTDYNSALKSRLTISKDNSKSQVPLKLSSVTAADTA |
| | | | VYYCARDRVTATLYAMDYWGQGTLVTVSS |
| SEQ ID | VH | C-H- | QVQLQESGPGLVKPSQTLSLTCTVSGFSLTAYGVNWVRQHPGKGLE |
| NO: 3057 | | VH18 | WLGMIWGDGNTDYNSALKSLLTISKDNSKSQVSLKLSSVTAADTA |
| | | | VYYCARDRVTATLYAMDYWGQGTLVTVSS |
| SEQ ID | VH | C-H- | QVQLQESGPGLVKPSDTLSLTCAVSGFSLTAYGVNWVRQPPGKGLE |
| NO: 3058 | | VH19 | WLGMIWGDGNTDYNSALKSRLTISKDNSKSQVSLKLSSVTALDTAV |
| | | | YYCARDRVTATLYAMDYWGQGTLVTVSS |
| SEQ ID | VH | C-H- | QVQLQESGPGLVKPSDTLSLTCAVSGFSLTAYGVNWVRQPPGKGLE |
| NO: 3059 | | VH.20 | WLGMIWGDGNTDYNSALKSRLTISKDNSKSQVSLKLSSVTAVDTA |
| | | | VYYCARDRVTATLYAMDYWGQGTLVTVSS |
| SEQ ID | VH | C-H- | QVQLQESGSGLVKPSQTLSLTCAVSGFSLTAYGVNWVRQPPGKGLE |
| NO: 3060 | | VH21 | WLGMIWGDGNTDYNSALKSRLTISKDNSKSQVSLKLSSVTAADTA |
| | | | VYYCARDRVTATLYAMDYWGQGTLVTVSS |
| SEQ ID | VH | C-H- | EVQLVESGGGLVQPGRSLRLSCTVSGFSLTAYGVNWVRQAPGKGL |
| NO: 3061 | | VH.22 | EWLGMIWGDGNTDYNSALKSRLTISKDNSKSIVYLQMNSLKTEDTA |
| | | | VYYCARDRVTATLYAMDYWGQGTLVTVSS |
| SEQ ID | VH | C-H- | EVQLVESGGGLVQPGPSLRLSCTVSGFSLTAYGVNWVRQAPGKGLE |
| NO: 3062 | | VH.23 | WLGMIWGDGNTDYNSALKSRLTISKDNSKSIVYLQMNSLKTEDTA |
| | | | VYYCARDRVTATLYAMDYWGQGTLVTVSS |
| SEQ ID | VH | C-H- | QVQLQESGSGLVKPSQTLSLTCAVSGFSLTAYGVNWVRQSPGKGLE |
| NO: 3063 | | VH.24 | WLGMIWGDGNTDYNSALKSRLTISKDNSKSQVSLKLSSVTAADTA |
| | | | VYYCARDRVTATLYAMDYWGQGTLVTVSS |
| SEQ ID | VH | C-H- | QVQLQESGPGLVKPSETLSLTCTVSGFSLTAYGVNWVRQPAGKGLE |
| NO: 3064 | | VH.25 | WLGMIWGDGNTDYNSALKSRLTISKDNSKSQVSLKLSSVTAADTA |
| | | | VYYCARDRVTATLYAMDYWGQGTLVTVSS |
| SEQ ID | VH | C-H- | EVQLVESGGGLVKPGRSLRLSCTVSGFSLTAYGVNWVRQAPGKGL |
| NO: 3065 | | VH.26 | EWLGMIWGDGNTDYNSALKSRLTISKDNSKSIVYLQMNSLKTEDTA |
| | | | VYYCARDRVTATLYAMDYWGQGTLVTVSS |
| SEQ ID | VH | C-H- | QVQLQESGPGLVKPSETLSLTCAVYGFSLTAYGVNWVRQPPGKGLE |
| NO: 3066 | | VH.27 | WLGMIWGDGNTDYNSALKSRLTISKDNSKSQVYLKLSSVTAADTA |
| | | | VYYCARDRVTATLYAMDYWGQGTLVTVSS |
| SEQ ID | VH | C-H- | QVQLQESGPGLVKPSDTLSLTCAVSGFSLTAYGVNWVRQPPGKGLE |
| NO: 3067 | | VH.28 | WLGMIWGDGNTDYNSALKSRLTISKDNSKSQVSLKLSSVTAVDTG |
| | | | VYYCARDRVTATLYAMDYWGQGTLVTVSS |
| SEQ ID | VH | C-H- | EVQLVESGGGLVQPGGSLRLSCAVSGFSLTAYGVNWVRQAPGKGL |
| NO: 3068 | | VH.29 | EWLGMIWGDGNTDYNSALKSRLTISKDNSKSSVYLQMNSLKTEDT |
| | | | AVYYCARDRVTATLYAMDYWGQGTLVTVSS |
| SEQ ID | VH | C-H- | EVQLVESGGGLVKPGGSLRLSCAVSGFSLTAYGVNWVRQAPGKGL |
| NO: 3069 | | VH.30 | EWLGMIWGDGNTDYNSALKSRLTISKDNSKSTVYLQMNSLKTEDT |
| | | | AVYYCARDRVTATLYAMDYWGQGTLVTVSS |
| SEQ ID | VH | C-H- | QVQLQQSGPGLVKPSQTLSLTCAVSGFSLTAYGVNWVRQSPSRGLE |
| NO: 3070 | | VH.31 | WLGMIWGDGNTDYNSALKSRLTINKDNSKSQVSLQLNSVTPEDTA |
| | | | VYYCARDRVTATLYAMDYWGQGTLVTVSS |
| SEQ ID | VH | C-H- | QVQLVESGGGLVQPGGSLRLSCSVSGFSLTAYGVNWVRQAPGKGL |
| NO: 3071 | | VH.32 | EWLGMIWGDGNTDYNSALKSRLTISKDNSKSTVYLQMNSLRAEDT |
| | | | AVYYCARDRVTATLYAMDYWGQGTLVTVSS |
| SEQ ID | VH | C-H- | QVQLQQWGAGLLKPSETLSLTCAVYGFSLTAYGVNWVRQPPGKGL |
| NO: 3072 | | VH33 | EWLGMIWGDGNTDYNSALKSRLTISKDNSKSQVSLKLSSVTAADTA |
| | | | VYYCARDRVTATLYAMDYWGQGTLVTVSS |
| SEQ ID | VH | C-H- | QVQLVESGGGVVQPGRSLRLSCAVSGFSLTAYGVNWVRQAPGKGL |
| NO: 3073 | | VH.34 | EWLGMIWGDGNTDYNSALKSRLTISKDNSTSTVFLQMNSLRAEDT |
| | | | AVYYCARDRVTATLYAMDYWGQGTLVTVSS |
| SEQ ID | VH | C-H- | EVQLVESGGGLVQPGGSLRLSCAVSGFSLTAYGVNWVRQAPGKGL |
| NO: 3074 | | VH.35 | EWLGMIWGDGNTDYNSALKSRLTISKDNSKSTVYLQMNSLRAEDT |
| | | | AVYYCARDRVTATLYAMDYWGQGTLVTVSS |
| SEQ ID | VH | C-H- | EVQLVESGGGLVQPGGSLRLSCAVSGFSLTAYGVNWVRQAPGKGL |
| NO: 3075 | | VH.36 | EWLGMIWGDGNTDYNSALKSRLTISKDNAKSSVYLQMNSLRDEDT |
| | | | AVYYCARDRVTATLYAMDYWGQGTLVTVSS |
| SEQ ID | VH | C-H- | EVQLLESGGGLVQPGGSLRLSCAVSGFSLTAYGVNWVRQAPGKGL |
| NO: 3076 | | VH.37 | EWLGMIWGDGNTDYNSALKSRLTISKDNSKSTVYLQMNSLRAEDT |
| | | | AVYYCARDRVTATLYAMDYWGQGTLVTVSS |
| SEQ ID | VH | C-H- | QVQLVESGGGLVKPGGSLRLSCAVSGFSLTAYGVNWVRQAPGKGL |
| NO: 3077 | | VH.38 | EWLGMIWGDGNTDYNSALKSRLTISKDNAKSSVYLQMNSLRAEDT |
| | | | AVYYCARDRVTATLYAMDYWGQGTLVTVSS |
| SEQ ID | VH | C-H- | EVQLVESGGGLVQPGGSLKLSCAVSGFSLTAYGVNWVRQASGKGL |
| NO: 3078 | | VH.39 | EWLGMIWGDGNTDYNSALKSRLTISKDNSKSTVYLQMNSLKTEDT |
| | | | AVYYCARDRVTATLYAMDYWGQGTLVTVSS |
| SEQ ID | VH | C-H- | QVQLLESGGGLVKPGGSLRLSCAVSGFSLTAYGVNWVRQAPGKGL |
| NO: 3079 | | VH.40 | EWLGMIWGDGNTDYNSALKSRLTISKDNAKSSVYLQMNSLRAEDT |
| | | | AVYYCARDRVTATLYAMDYWGQGTLVTVSS |
| SEQ ID | VH | C-H- | QVQLVESGGGVVQPGRSLRLSCAVSGFSLTAYGVNWVRQAPGKGL |
| NO: 3080 | | VH.41 | EWLGMIWGDGNTDYNSALKSRLTISKDNSKSTVYLQMNSLRAEDT |
| | | | AVYYCARDRVTATLYAMDYWGQGTLVTVSS |
| SEQ ID | VH | C-H- | QVQLVESGGGVVQPGRSLRLSCAVSGFSLTAYGVNWVRQAPGKGL |
| NO: 3081 | | VH.42 | EWLGMIWGDGNTDYNSALKSRLTISKDNSKSRVYLQMNSLRAEDT |
| | | | AVYYCARDRVTATLYAMDYWGQGTLVTVSS |
| SEQ ID | VH | C-H- | QVQLVESGGGVVQPGRSLRLSCAVSGFSLTAYGVNWVRQAPGKGL |
| NO: 3082 | | VH.43 | EWLGMIWGDGNTDYNSALKSRLAISKDNSKSTVYLQMNSLRAEDT |
| | | | AVYYCARDRVTATLYAMDYWGQGTLVTVSS |
| SEQ ID | VH | C-H- | QVQLVESGGGVVQPGGSLRLSCAVSGFSLTAYGVNWVRQAPGKGL |
| NO: 3083 | | VH.44 | EWLGMIWGDGNTDYNSALKSRLTISKDNSKSTVYLQMNSLRAEDT |
| | | | AVYYCARDRVTATLYAMDYWGQGTLVTVSS |
| SEQ ID | VH | C-H- | EVQLVESGGGLVQPGGSLRLSCAVSGFSLTAYGVNWVRQAPGKGL |
| NO: 3084 | | VH.45 | EWLGMIWGDGNTDYNSALKSRLTISKDNAKSTVYLQMNSLRAEDT |
| | | | AVYYCARDRVTATLYAMDYWGQGTLVTVSS |
| SEQ ID | VH | C-H- | EVQLVESGGGLVQPGGSLRLSCAVSGFSLTAYGVNWVRQAPGKGL |
| NO: 3085 | | VH.46 | EWLGMIWGDGNTDYNSALKSRLTISKDNAKSSVYLQMNSLRAEDT |
| | | | AVYYCARDRVTATLYAMDYWGQGTLVTVSS |
| SEQ ID | VH | C-H- | EVQLVESGGVVVQPGGSLRLSCAVSGFSLTAYGVNWVRQAPGKGL |
| NO: 3086 | | VH.47 | EWLGMIWGDGNTDYNSALKSRLTISKDNSKSSVYLQMNSLRTEDT |
| | | | ALYYCARDRVTATLYAMDYWGQGTLVTVSS |
| SEQ ID | VH | C-H- | EVQLVESGGGLVQPGGSLRLSCAVSGFSLTAYGVNWVRQAPGKGL |
| NO: 3087 | | VH.48 | EWLGMIWGDGNTDYNSALKSRLTISKHNSKSTVYLQMNSLRAEDT |
| | | | AVYYCARDRVTATLYAMDYWGQGTLVTVSS |
| SEQ ID | VH | C-H- | EVQLVESGGGLVKPGGSLRLSCAVSGFSLTAYGVNWVRQAPGKGL |
| NO: 3088 | | VH.49 | EWLGMIWGDGNTDYNSALKSRLTISKDNAKSSVYLQMNSLRAEDT |
| | | | AVYYCARDRVTATLYAMDYWGQGTLVTVSS |
| SEQ ID | VH | C-H- | EVQLVESGGGLIQPGGSLRLSCAVSGFSLTAYGVNWVRQPPGKGLE |
| NO: 3089 | | VH.50 | WLGMIWGDGNTDYNSALKSRLTISKDNSKSTVYLQMNSLRAEDTA |
| | | | VYYCARDRVTATLYAMDYWGQGTLVTVSS |

[0809] Exemplary anti-TCRβ V5 antibodies of the disclosure are provided in Table 11. In some embodiments, the anti-TCRβ V5 is antibody E, e.g., humanized antibody E (antibody E-H), as provided in Table 11. In some embodiments, the anti-TCRβV antibody comprises one or more (e.g., all three) of a LC CDR1, LC CDR2, and LC CDR3 provided in Table 11; and/or one or more (e.g., all three) of a HC CDR1, HC CDR2, and HC CDR3 provided in Table 11, or a sequence with at least 95% identity thereto. In some embodiments, antibody E comprises a variable heavy chain (VH) and/or a variable light chain (VL) provided in Table 11, or a sequence with at least 95% identity thereto.

[0810] In some embodiments, antibody E comprises a heavy chain comprising the amino acid sequence of SEQ ID NO: 3284 and/or a light chain comprising the amino acid sequence of SEQ ID NO: 3285, or a sequence with at least 95% identity thereto.

TABLE 11
Amino acid sequences for anti TCRβ V5 antibodies
Amino acid and nucleotide sequences for murine and humanized antibody molecules which bind
to TCRVB 5 (e.g., TCRVB 5-5 or TCRVB 5-6). The amino acid the heavy and light chain CDRs,
and the amino acid and nucleotide sequences of the heavy and light chain variable regions,
and the heavy and light chains are shown.
Murine antibody E, also referred to as MH3-2

| | | |
|---|---|---|
| SEQ ID NO: 1298 | HC CDR1 (Kabat) | SSWMN |
| SEQ ID NO: 1299 | HC CDR2 (Kabat) | RIYPGDGDTKYNGKFKG |
| SEQ ID NO: 1300 | HC CDR3 (Kabat) | RGTGGWYFDV |
| SEQ ID NO: 1302 | HC CDR1 (Chothia) | GYAFSSS |
| SEQ ID NO: 1303 | HC CDR2 (Chothia) | YPGDGD |
| SEQ ID NO: 1301 | HC CDR3 (Chothia) | RGTGGWYFDV |
| SEQ ID NO: 1304 | HC CDR1 (Combined) | GYAFSSSWMN |
| SEQ ID NO: 1299 | HC CDR2 (Combined) | RIYPGDGDTKYNGKFKG |
| SEQ ID NO: 1301 | HC CDR3 (Combined) | RGTGGWYFDV |
| SEQ ID NO: 1305 | LC CDR1 (Kabat) | RASESVDSSGNSFMH |
| SEQ ID NO: 1306 | LC CDR2 (Kabat) | RASNLES |
| SEQ ID NO: 1307 | LC CDR3 (Kabat) | QQSFDDPFT |
| SEQ ID NO: 1308 | LC CDR1 (Chothia) | SESVDSSGNSF |
| SEQ ID NO: 1306 | LC CDR2 (Chothia) | RASNLES |
| SEQ ID NO: 1307 | LC CDR3 (Chothia) | QQSFDDPFT |
| SEQ ID NO: 1305 | LC CDR1 (Combined) | RASESVDSSGNSFMH |
| SEQ ID NO: 1306 | LC CDR2 (Combined) | RASNLES |
| SEQ ID NO: 1307 | LC CDR3 (Combined) | QQSFDDPFT |
| SEQ ID NO: 3091 | VH | QVQLQQSGPELVKPGASVKISCKASGYAFSSSWM |
| | | NWVKQRPGQGLEWIGRIYPGDGDTKYNGKFKG |
| | | KATLTADKSSSTAYMHLSSLTSVDSAVYFCARRG |
| | | TGGWYFDVWGAGTTVTVSS |
| SEQ ID NO: 3284 | Heavy chain | METDTLLLWVLLLWVPGSTGQVQLQOSGPELVK |
| | | PGASVKISCKASGYAFSSSWMNWVKQRPGQGLE |
| | | WIGRIYPGDGDTKYNGKFKGKATLTADKSSSTA |
| | | YMHLSSLTSVDSAVYFCARRGTGGWYFDVWGA |
| | | GTTVTVSSAKTTAPSVYPLAPVCGDTTGSSVTLG |
| | | CLVKGYFPEPVTLTWNSGSLSSGVHTFPAVLQSD |
| | | LYTLSSSVTVTSSTWPSQSITCNVAHPASSTKVDK |
| | | KIEPRGPTIKPCPPCKCPAPNLLGGPSVFIFPPKIK |
| | | DVLMISLSPIVTCVVVDVSEDDPDVQISWFVNNVE |
| | | VHTAQTQTHREDYNSTLRVVSALPIQHQDWMSG |
| | | KEFKCKVNNKDLPAPIERTISKPKGSVRAPQVYV |
| | | LPPPEEEMTKKQVTLTCMVTDFMPEDIYVEWTN |
| | | NGKTELNYKNTEPVLDSDGSYFMYSKLRVEKKN |
| | | WVERNSYSCSVVHEGLHNHHTTKSFSRTPGK |
| SEQ ID NO: 3092 | VL | DIVLTQSPASLAVSLGQRATISCRASESVDSSGNS |
| | | FMHWYQQKPGQPPQLLIYRASNLESGIPARFSGS |
| | | GSRTDFTLTINPVEADDVATFYCQQSFDDPFTFGS |
| | | GTKLEIK |
| SEQ ID NO: 3285 | Light chain | METDTLLLWVLLLWVPGSTGDIVLTQSPASLAVS |
| | | LGQRATISCRASESVDSSGNSFMHWYQQKPGQPP |
| | | QLLIYRASNLESGIPARFSGSGSRTDFTLTINPVEA |
| | | DDVATFYCQQSFDDPFTFGSGTKLEIKRADAAPT |
| | | VSIFPPSSEQLTSGGASVVCFLNNFYPKDINVKWK |
| | | IDGSERQNGVLNSWTDQDSKDSTYSMSSTLTLTK |
| | | DEYERHNSYTCEATHKTSTSPIVKSFNRNEC |

Humanized antibody E (E-H antibody)
Variable light chain (VL)

| | | | |
|---|---|---|---|
| SEQ ID | VL | E-H.1 | DIVLTQSPDSLAVSLGERATINCRASESVDSSGNSFMHWYQQKPGQ |
| NO: 3093 | | | PPQLLIYRASNLESGVPDRFSGSGSRTDFTLTISSLQAEDVAVYYCQ |
| | | | QSFDDPFTFGQGTKLEIK |
| SEQ ID | VL | E-H.2 | EIVLTQSPATLSLSPGERATLSCRASESVDSSGNSFMHWYQQKPGQ |
| NO: 3094 | | | APQLLIYRASNLESGIPARFSGSGSRTDFTLTISSLEPEDFAVYYCQQ |
| | | | SFDDPFTFGQGTKLEIK |
| SEQ ID | VL | E-H.3 | EIVLTQSPATLSLSPGERATLSCRASESVDSSGNSFMHWYQQKPGQ |
| NO: 3095 | | | APQLLIYRASNLESGIPARFSGSGSRTDFTLTISRLEPEDFAVYYCQQ |
| | | | SFDDPFTFGQGTKLEIK |
| SEQ ID | VL | E-H.4 | EIVLTQSPATLSLSPGERATLSCRASESVDSSGNSFMHWYQQKPGQ |
| NO: 3096 | | | APQLLIYRASNLESGIPARFSGSGSRTDFTLTISSLQPEDFAVYYCQQ |
| | | | SFDDPFTFGQGTKLEIK |
| SEQ ID | VL | E-H.5 | DIQLTQSPSSLSASVGDRVTITCRASESVDSSGNSFMHWYQQKPGQ |
| NO: 3097 | | | APQLLIYRASNLESGVPSRFSGSGSRTDFTLTISSLQPEDVATYYCQ |
| | | | QSFDDPFTFGQGTKLEIK |
| SEQ ID | VL | E-H.6 | EIVLTQSPATLSLSPGERATLSCRASESVDSSGNSFMHWYQQKPGQ |
| NO: 3098 | | | APQLLIYRASNLESGIPARFSGSGPRTDFTLTISSLEPEDFAVYYCQQ |
| | | | SFDDPFTFGQGTKLEIK |
| SEQ ID | VL | E-H.7 | EIVLTQSPATLSLSPGERATLSCRASESVDSSGNSFMHWYQQKPGQ |
| NO: 3099 | | | APQLLIYRASNLESGIPDRFSGSGSRTDFTLTISRLEPEDFAVYYCQQ |
| | | | SFDDPFTFGQGTKLEIK |
| SEQ ID | VL | E-H.8 | DIQLTQSPSSLSASVGDRVTITCRASESVDSSGNSFMHWYQQKPGK |
| NO: 3100 | | | VPQLLIYRASNLESGVPSRFSGSGSRTDFTLTISSLQPEDVATYYCQ |
| | | | QSFDDPFTFGQGTKLEIK |
| SEQ ID | VL | E-H.9 | DIQLTQSPSSLSASVGDRVTITCRASESVDSSGNSFMHWYQQKPGK |
| NO: 3101 | | | TPQLLIYRASNLESGIPSRFSGSGSRTDFTLTIRSLQPEDFATYYCQQ |
| | | | SFDDPFTFGQGTKLEIK |
| SEQ ID | VL | E-H.10 | EIVLTQSPGTLSLSPGERATLSCRASESVDSSGNSFMHWYQQKPGQ |
| NO: 3102 | | | APQLLIYRASNLESGIPDRFSGSGSRTDFTLTISRLEPEDFAVYYCQQ |
| | | | SFDDPFTFGQGTKLEIK |
| SEQ ID | VL | E-H.11 | EIVLTQSPATLSLSPGERATLSCRASESVDSSGNSFMHWYQQKPGL |
| NO: 3103 | | | APQLLIYRASNLESGIPDRFSGSGSRTDFTLTISRLEPEDFAVYYCQQ |
| | | | SFDDPFTFGQGTKLEIK |
| SEQ ID | VL | E-H.12 | DIQLTQSPSSLSASVGDRVTITCRASESVDSSGNSFMHWYQQKPGK |
| NO: 3104 | | | APQLLIYRASNLESGVPSRFSGSGSRTDFTLTISSLQPEDFATYYCQQ |
| | | | SFDDPFTFGQGTKLEIK |
| SEQ ID | VL | E-H.13 | DIQLTQSPSSVSASVGDRVTITCRASESVDSSGNSFMHWYQQKPGK |
| NO: 3105 | | | APQLLIYRASNLESGVPSRFSGSGSRTDFTLTISSLQPEDFATYYCQQ |
| | | | SFDDPFTFGQGTKLEIK |
| SEQ ID | VL | E-H.14 | AIQLTQSPSSLSASVGDRVTITCRASESVDSSGNSFMHWYQQKPGK |
| NO: 3106 | | | APQLLIYRASNLESGVPSRFSGSGSRTDFTLTISSLQPEDFATYYCQQ |
| | | | SFDDPFTFGQGTKLEIK |
| SEQ ID | VL | E-H.15 | DIQLTQSPSFLSASVGDRVTITCRASESVDSSGNSFMHWYQQKPGK |
| NO: 3107 | | | APQLLIYRASNLESGVPSRFSGSGSRTEFTLTISSLQPEDFATYYCQQ |
| | | | SFDDPFTFGQGTKLEIK |
| SEQ ID | VL | E-H.16 | DIQLTQSPSSLSASVGDRVTITCRASESVDSSGNSFMHWYQQKPGK |
| NO: 3108 | | | APQLLIYRASNLESGVPSRFSGSGSRTDFTFTISSLQPEDIATYYCQQ |
| | | | SFDDPFTFGQGTKLEIK |
| SEQ ID | VL | E-H.17 | EIVLTQSPATLSVSPGERATLSCRASESVDSSGNSFMHWYQQKPGQ |
| NO: 3109 | | | APQLLIYRASNLESGIPARFSGSGSRTEFTLTISILQSEDFAVYYCQQ |
| | | | SFDDPFTFGQGTKLEIK |
| SEQ ID | VL | E-H.18 | EIVLTQSPATLSVSPGERATLSCRASESVDSSGNSFMHWYQQKPGQ |
| NO: 3110 | | | APQLLIYRASNLESGIPARFSGSGSRTEFTLTISSLQSEDFAVYYCQQ |
| | | | SFDDPFTFGQGTKLEIK |
| SEQ ID | VL | E-H.19 | AIRLTQSPFSLSASVGDRVTITCRASESVDSSGNSFMHWYQQKPAK |
| NO: 3111 | | | APQLFIYRASNLESGVPSRFSGSGSRTDFTLTISSLQPEDFATYYCQQ |
| | | | SFDDPFTFGQGTKLEIK |
| SEQ ID | VL | E-H.20 | DIQLTQSPSSLSASVGDRVTITCRASESVDSSGNSFMHWYQQKPGK |
| NO: 3112 | | | APQSLIYRASNLESGVPSRFSGSGSRTDFTLTISSLQPEDFATYYCQQ |
| | | | SFDDPFTFGQGTKLEIK |
| SEQ ID | VL | E-H.21 | DIQLTQSPSSLSASVGDRVTITCRASESVDSSGNSFMHWYQQKPGK |
| NO: 3113 | | | APQRLIYRASNLESGVPSRFSGSGSRTEFTLTISNLQPEDFATYYCQ |
| | | | QSFDDPFTFGQGTKLEIK |
| SEQ ID | VL | E-H.22 | DIQLTQSPSTLSASVGDRVTITCRASESVDSSGNSFMHWYQQKPGK |
| NO: 3114 | | | APQLLIYRASNLESGVPSRFSGSGSRTEFTLTISSLQPDDFATYYCQQ |
| | | | SFDDPFTFGQGTKLEIK |
| SEQ ID | VL | E-H.23 | EIVLTQSPDFQSVTPKEKVTITCRASESVDSSGNSFMHWYQQKPDQ |
| NO: 3115 | | | SPQLLIYRASNLESGVPSRFSGSGSRTDFTLTINSLEAEDAATYYCQ |
| | | | QSFDDPFTFGQGTKLEIK |
| SEQ ID | VL | E-H.24 | DIQLTQSPSSLSASVGDRVTITCRASESVDSSGNSFMHWYQQKPGK |
| NO: 3116 | | | APQSLIYRASNLESGVPSKFSGSGSRTDFTLTISSLQPEDFATYYCQQ |
| | | | SFDDPFTFGQGTKLEIK |
| SEQ ID | VL | E-H.25 | DIQLTQSPSSLSASVGDRVTITCRASESVDSSGNSFMHWYQQKPGK |
| NO: 3117 | | | APQRLIYRASNLESGVPSRFSGSGSRTEFTLTISSLQPEDFATYYCQQ |
| | | | SFDDPFTFGQGTKLEIK |
| SEQ ID | VL | E-H.26 | DIVLTQTPLSLSVTPGQPASISCRASESVDSSGNSFMHWYLQKPGQP |
| NO: 3118 | | | PQLLIYRASNLESGVPDRFSGSGSRTDFTLKISRVEAEDVGVYYCQ |
| | | | QSFDDPFTFGQGTKLEIK |
| SEQ ID | VL | E-H.27 | DIQLTQSPSSLSASVGDRVTITCRASESVDSSGNSFMHWYQQKPEK |
| NO: 3119 | | | APQSLIYRASNLESGVPSRFSGSGSRTDFTLTISSLQPEDFATYYCQQ |
| | | | SFDDPFTFGQGTKLEIK |
| SEQ ID | VL | E-H.28 | EIVLTQSPPTLSLSPGERVTLSCRASESVDSSGNSFMHWYQQKPGQ |
| NO: 3120 | | | APQLLIYRASNLESGIPARFSGSGSRTDFTLTISSLQPEDFAVYYCQQ |
| | | | SFDDPFTFGQGTKLEIK |
| SEQ ID | VL | E-H.29 | DIQLTQSPSAMSASVGDRVTITCRASESVDSSGNSFMHWYQQKPG |
| NO: 3121 | | | KVPQRLIYRASNLESGVPSRFSGSGSRTEFTLTISSLQPEDFATYYCQ |
| | | | QSFDDPFTFGQGTKLEIK |
| SEQ ID | VL | E-H.30 | DIVLTQSPLSLPVTPGEPASISCRASESVDSSGNSFMHWYLQKPGQS |
| NO: 3122 | | | PQLLIYRASNLESGVPDRFSGSGSRTDFTLKISRVEAEDVGVYYCQ |
| | | | QSFDDPFTFGQGTKLEIK |
| SEQ ID | VL | E-H.31 | DIVLTQTPLSLPVTPGEPASISCRASESVDSSGNSFMHWYLQKPGQS |
| NO: 3123 | | | PQLLIYRASNLESGVPDRFSGSGSRTDFTLKISRVEAEDVGVYYCQ |
| | | | QSFDDPFTFGQGTKLEIK |
| SEQ ID | VL | E-H.32 | DIVLTQTPLSLSVTPGQPASISCRASESVDSSGNSFMHWYLQKPGQS |
| NO: 3124 | | | PQLLIYRASNLESGVPDRFSGSGSRTDFTLKISRVEAEDVGVYYCQ |
| | | | QSFDDPFTFGQGTKLEIK |
| SEQ ID | VL | E-H.33 | EIVLTQSPPTLSLSPGERVTLSCRASESVDSSGNSFMHWYQQKPGQ |
| NO: 3125 | | | APQLLIYRASNLESSIPARFSGSGSRTDFTLTISSLQPEDFAVYYCQQ |
| | | | SFDDPFTFGQGTKLEIK |
| SEQ ID | VL | E-H.34 | DIVLTQSPLSLPVTLGQPASISCRASESVDSSGNSFMHWYQQRPGQS |
| NO: 3126 | | | PQRLIYRASNLESGVPDRFSGSGSRTDFTLKISRVEAEDVGVYYCQ |
| | | | QSFDDPFTFGQGTKLEIK |
| SEQ ID | VL | E-H.35 | DIVLTQTPLSSPVTLGQPASISCRASESVDSSGNSFMHWYQQRPGQP |
| NO: 3127 | | | PQLLIYRASNLESGVPDRFSGSGARTDFTLKISRVEAEDVGVYYCQ |
| | | | QSFDDPFTFGQGTKLEIK |
| SEQ ID | VL | E-H.36 | DIVLTQSPAFLSVTPGEKVTITCRASESVDSSGNSFMHWYQQKPDQ |
| NO: 3128 | | | APQLLIYRASNLESGVPSRFSGSGSRTDFTFTISSLEAEDAATYYCQ |
| | | | QSFDDPFTFGQGTKLEIK |
| SEQ ID | VL | E-H.37 | DIQLIQSPSFLSASVGDRVSIICRASESVDSSGNSFMHWYLQKPGKS |
| NO: 3129 | | | PQLFIYRASNLESGVSSRFSGRGSRTDFTLTIISLKPEDFAAYYCQQS |
| | | | FDDPFTFGQGTKLEIK |
| SEQ ID | VL | E-H.38 | EIVLTQTPLSLSITPGEQASISCRASESVDSSGNSFMHWYLQKARPV |
| NO: 3130 | | | PQLLIYRASNLESGVPDRFSGSGSRTDFTLKISRVEAEDFGVYYCQQ |
| | | | SFDDPFTFGQGTKLEIK |
| SEQ ID | VL | E-H.39 | EIVLTQTPLSLSITPGEQASMSCRASESVDSSGNSFMHWYLQKARP |
| NO: 3131 | | | VPQLLIYRASNLESGVPDRFSGSGSRTDFTLKISRVEAEDFGVYYCQ |
| | | | QSFDDPFTFGQGTKLEIK |
| SEQ ID | VL | E-H.40 | EITLTQSPAFMSATPGDKVNISCRASESVDSSGNSFMHWYQQKPGE |
| NO: 3132 | | | APQFIIYRASNLESGIPPRFSGSGYRTDFTLTINNIESEDAAYYYCQQ |
| | | | SFDDPFTFGQGTKLEIK |

Variable HEAVY chain (VH)

| | | | |
|---|---|---|---|
| SEQ ID | VH | E-H.1 | QVQLVQSGAEVKKPGASVKVSCKASGYAFSSSWMNWVRQAPGQ |
| NO: 3133 | | | GLEWIGRIYPGDGDTKYNGKFKGRATLTADKSTSTAYMELSSLRS |
| | | | EDTAVYYCARRGTGGWYFDVWGQGTTVTVSS |
| SEQ ID | VH | E-H.2 | QVQLVQSGAEVKKPGSSVKVSCKASGYAFSSSWMNWVRQAPGQ |
| NO: 3134 | | | GLEWIGRIYPGDGDTKYNGKFKGRATLTADKSTSTAYMELSSLRS |
| | | | EDTAVYYCARRGTGGWYFDVWGQGTTVTVSS |
| SEQ ID | VH | E-H.3 | QVQLVQSGAEVKKPGASVKVSCKASGYAFSSSWMNWVRQAPGK |
| NO: 3135 | | | GLEWIGRIYPGDGDTKYNGKFKGRATLTADKSTSTAYMELSSLRS |
| | | | EDTAVYYCARRGTGGWYFDVWGQGTTVTVSS |
| SEQ ID | VH | E-H.4 | QVQLVQSGAEVKKPGASVKVSCKASGYAFSSSWMNWVRQAPGQ |
| NO: 3136 | | | ELEWIGRIYPGDGDTKYNGKFKGRATLTADKSISTAYMELSSLRSE |
| | | | DTATYYCARRGTGGWYFDVWGQGTTVTVSS |
| SEQ ID | VH | E-H.5 | EVQLVQSGAEVKKPGATVKISCKASGYAFSSSWMNWVQQAPGKG |
| NO: 3137 | | | LEWIGRIYPGDGDTKYNGKFKGRATLTADKSTSTAYMELSSLRSE |
| | | | DTAVYYCARRGTGGWYFDVWGQGTTVTVSS |
| SEQ ID | VH | E-H.6 | QVQLVQSGAEVKKTGSSVKVSCKASGYAFSSSWMNWVRQAPGQ |
| NO: 3138 | | | ALEWIGRIYPGDGDTKYNGKFKGRATLTADKSMSTAYMELSSLRS |
| | | | EDTAMYYCARRGTGGWYFDVWGQGTTVTVSS |
| SEQ ID | VH | E-H.7 | QVQLVQSGAEVKKPGASVKVSCKASGYAFSSSWMNWVRQAPGQ |
| NO: 3139 | | | RLEWIGRIYPGDGDTKYNGKFKGRATLTADKSASTAYMELSSLRS |
| | | | EDMAVYYCARRGTGGWYFDVWGQGTTVTVSS |
| SEQ ID | VH | E-H.8 | QVQLVQSGAEVKKPGASVKVSCKASGYAFSSSWMNWVRQAPGQ |
| NO: 3140 | | | GLEWIGRIYPGDGDTKYNGKFKGRATLTADKSTSTAYMELRSLRS |
| | | | DDMAVYYCARRGTGGWYFDVWGQGTTVTVSS |
| SEQ ID | VH | E-H.9 | QVQLVQSGAEVKKPGASVKVSCKASGYAFSSSWMNWVRQAPGQ |
| NO: 3141 | | | RLEWIGRIYPGDGDTKYNGKFKGRATLTADKSASTAYMELSSLRS |
| | | | EDTAVYYCARRGTGGWYFDVWGQGTTVTVSS |
| SEQ ID | VH | E-H.10 | QVQLVQSGAEVKKPGASVKVSCKASGYAFSSSWMNWVRQAPGQ |
| NO: 3142 | | | GLEWIGRIYPGDGDTKYNGKFKGRATLTADKSTSTAYMELRSLRS |
| | | | DDTAVYYCARRGTGGWYFDVWGQGTTVTVSS |
| SEQ ID | VH | E-H.11 | QVQLVQSGAEVKKPGASVKVSCKASGYAFSSSWMNWVRQAPGQ |
| NO: 3143 | | | GLEWIGRIYPGDGDTKYNGKFKGRATLTADKSISTAYMELSRLRSD |
| | | | DTAVYYCARRGTGGWYFDVWGQGTTVTVSS |
| SEQ ID | VH | E-H.12 | QVQLVQSGAEVKKPGASVKVSCKASGYAFSSSWMNWVRQAPGQ |
| NO: 3144 | | | GLEWIGRIYPGDGDTKYNGKFKGRATLTADKSISTAYMELSRLRSD |
| | | | DTVVYYCARRGTGGWYFDVWGQGTTVTVSS |
| SEQ ID | VH | E-H.13 | QVQLVQSGAEVKKPGASVKVSCKASGYAFSSSWMNWVRQAPGQ |
| NO: 3145 | | | GLEWIGRIYPGDGDTKYNGKFKGWATLTADKSISTAYMELSRLRS |
| | | | DDTAVYYCARRGTGGWYFDVWGQGTTVTVSS |
| SEQ ID | VH | E-H.14 | QVQLVQSGAEVKKPGASVKVSCKASGYAFSSSWMNWVRQATGQ |
| NO: 3146 | | | GLEWIGRIYPGDGDTKYNGKFKGRATLTANKSISTAYMELSSLRSE |
| | | | DTAVYYCARRGTGGWYFDVWGQGTTVTVSS |
| SEQ ID | VH | E-H.15 | QVQLVQSGSELKKPGASVKVSCKASGYAFSSSWMNWVRQAPGQG |
| NO: 3147 | | | LEWIGRIYPGDGDTKYNGKFKGRAVLSADKSVSTAYLQISSLKAED |
| | | | TAVYYCARRGTGGWYFDVWGQGTTVTVSS |
| SEQ ID | VH | E-H.16 | QVQLVQSGPEVKKPGTSVKVSCKASGYAFSSSWMNWVRQARGQ |
| NO: 3148 | | | RLEWIGRIYPGDGDTKYNGKFKGRATLTADKSTSTAYMELSSLRSE |
| | | | DTAVYYCARRGTGGWYFDVWGQGTTVTVSS |
| SEQ ID | VH | E-H.17 | EVQLVQSGAEVKKPGESLKISCKASGYAFSSSWMNWVRQMPGKG |
| NO: 3149 | | | LEWIGRIYPGDGDTKYNGKFKGQATLSADKSISTAYLQWSSLKAS |
| | | | DTAMYYCARRGTGGWYFDVWGQGTTVTVSS |
| SEQ ID | VH | E-H.18 | QVQLVQSGSELKKPGASVKVSCKASGYAFSSSWMNWVRQAPGQG |
| NO: 3150 | | | LEWIGRIYPGDGDTKYNGKFKGRAVLSADKSVSMAYLQISSLKAE |
| | | | DTAVYYCARRGTGGWYFDVWGQGTTVTVSS |
| SEQ ID | VH | E-H.19 | QVQLVQSGHEVKQPGASVKVSCKASGYAFSSSWMNWVPQAPGQ |
| NO: 3151 | | | GLEWIGRIYPGDGDTKYNGKFKGRAVLSADKSASTAYLQISSLKAE |
| | | | DMAMYYCARRGTGGWYFDVWGQGTTVTVSS |
| SEQ ID | VH | E-H.20 | EVQLVQSGAEVKKPGESLKISCKASGYAFSSSWMNWVRQMPGKG |
| NO: 3152 | | | LEWIGRIYPGDGDTKYNGKFKGQATLSADKPISTAYLQWSSLKAS |
| | | | DTAMYYCARRGTGGWYFDVWGQGTTVTVSS |
| SEQ ID | VH | E-H.21 | EVQLVQSGAEVKKPGESLRISCKASGYAFSSSWMNWVRQMPGKG |
| NO: 3153 | | | LEWIGRIYPGDGDTKYNGKFKGQATLSADKSISTAYLQWSSLKAS |
| | | | DTAMYYCARRGTGGWYFDVWGQGTTVTVSS |
| SEQ ID | VH | E-H.22 | EVQLVQSGAEVKKPGESLRISCKASGYAFSSSWMNWVRQMPGKG |
| NO: 3154 | | | LEWIGRIYPGDGDTKYNGKFKGHATLSADKSISTAYLQWSSLKAS |
| | | | DTAMYYCARRGTGGWYFDVWGQGTTVTVSS |
| SEQ ID | VH | E-H.23 | QVQLVQSGAEVKKTGSSVKVSCKASGYAFSSSWMNWVRQAPRQ |
| NO: 3155 | | | ALEWIGRIYPGDGDTKYNGKFKGRATLTADKSMSTAYMELSSLRS |
| | | | EDTAMYYCARRGTGGWYFDVWGQGTTVTVSS |
| SEQ ID | VH | E-H.24 | EVQLVESGGGLVQPGRSLRLSCTASGYAFSSSWMNWVRQAPGKG |
| NO: 3156 | | | LEWIGRIYPGDGDTKYNGKFKGRATLSADKSKSIAYLQMNSLKTE |
| | | | DTAVYYCARRGTGGWYFDVWGQGTTVTVSS |
| SEQ ID | VH | E-H.25 | EVQLVESGGGLVQPGPSLRLSCTASGYAFSSSWMNWVRQAPGKG |
| NO: 3157 | | | LEWIGRIYPGDGDTKYNGKFKGRATLSADKSKSIAYLQMNSLKTE |
| | | | DTAVYYCARRGTGGWYFDVWGQGTTVTVSS |
| SEQ ID | VH | E-H.26 | QVQLQESGPGLVKPSQTLSLTCTASGYAFSSSWMNWVRQPPGKGL |
| NO: 3158 | | | EWIGRIYPGDGDTKYNGKFKGRATLSADKSKSQASLKLSSVTAAD |
| | | | TAVYYCARRGTGGWYFDVWGQGTTVTVSS |
| SEQ ID | VH | E-H.27 | QVQLQESGPGLVKPSGTLSLTCAASGYAFSSSWMNWVRQPPGKGL |
| NO: 3159 | | | EWIGRIYPGDGDTKYNGKFKGRATLSADKSKSQASLKLSSVTAAD |
| | | | TAVYYCARRGTGGWYFDVWGQGTTVTVSS |
| SEQ ID | VH | E-H.28 | EVQLVESGGGLVKPGRSLRLSCTASGYAFSSSWMNWVRQAPGKG |
| NO: 3160 | | | LEWIGRIYPGDGDTKYNGKFKGRATLSADKSKSIAYLQMNSLKTE |
| | | | DTAVYYCARRGTGGWYFDVWGQGTTVTVSS |
| SEQ ID | VH | E-H.29 | EVQLVESGGGLVQPGGSLKLSCAASGYAFSSSWMNWVRQASGKG |
| NO: 3161 | | | LEWIGRIYPGDGDTKYNGKFKGRATLSADKSKSTAYLQMNSLKTE |
| | | | DTAVYYCARRGTGGWYFDVWGQGTTVTVSS |
| SEQ ID | VH | E-H.30 | QVQLQESGPGLVKPSQTLSLTCAASGYAFSSSWMNWVRQPPGKGL |
| NO: 3162 | | | EWIGRIYPGDGDTKYNGKFKGRATLSADKSKSQASLKLSSVTAAD |
| | | | TAVYYCARRGTGGWYFDVWGQGTTVTVSS |
| SEQ ID | VH | E-H.31 | EVQLVESGGGLVKPGGSLRLSCAASGYAFSSSWMNWVRQAPGKG |
| NO: 3163 | | | LEWIGRIYPGDGDTKYNGKFKGRATLSADKSKSTAYLQMNSLKTE |
| | | | DTAVYYCARRGTGGWYFDVWGQGTTVTVSS |
| SEQ ID | VH | E-H.32 | EVQLVESGGALVKPGGSLRLSCAASGYAFSSSWMNWVRQAPGKG |
| NO: 3164 | | | LEWIGRIYPGDGDTKYNGKFKGRATLSADKSKSTAYLQMNSLKTE |
| | | | DTAVYYCARRGTGGWYFDVWGQGTTVTVSS |
| SEQ ID | VH | E-H.33 | QVQLQESGPGLVKPSQTLSLTCAAYGYAFSSSWMNWVRQPPGKG |
| NO: 3165 | | | LEWIGRIYPGDGDTKYNGKFKGRATLSADKSKSQASLKLSSVTAA |
| | | | DTAVYYCARRGTGGWYFDVWGQGTTVTVSS |
| SEQ ID | VH | E-H.34 | QVQLQESGSGLVKPSQTLSLTCAASGYAFSSSWMNWVRQPPGKGL |
| NO: 3166 | | | EWIGRIYPGDGDTKYNGKFKGRATLSADKSKSQASLKLSSVTAAD |
| | | | TAVYYCARRGTGGWYFDVWGQGTTVTVSS |
| SEQ ID | VH | E-H.35 | EVQLVESGGGLVQPGGSLRLSCAASGYAFSSSWMNWVRQAPGKG |
| NO: 3167 | | | LEWIGRIYPGDGDTKYNGKFKGRATLSADKSKSSAYLQMNSLKTE |
| | | | DTAVYYCARRGTGGWYFDVWGQGTTVTVSS |
| SEQ ID | VH | E-H.36 | QVQLQESGPGLVKPSDTLSLTCTASGYAFSSSWMNWVRQPPGKGL |
| NO: 3168 | | | EWIGRIYPGDGDTKYNGKFKGRATLSADKSKSQASLKLSSVTAAD |
| | | | TAVYYCARRGTGGWYFDVWGQGTTVTVSS |
| SEQ ID | VH | E-H.37 | QVQLQESGPGLVKPSQTLSLTCTASGYAFSSSWMNWVRQHPGKG |
| NO: 3169 | | | LEWIGRIYPGDGDTKYNGKFKGRATLSADKSKSQASLKLSSVTAA |
| | | | DTAVYYCARRGTGGWYFDVWGQGTTVTVSS |
| SEQ ID | VH | E-H.38 | QVQLQESGPGLVKPSQTLSLTCTASGYAFSSSWMNWVRQHPGKG |
| NO: 3170 | | | LEWIGRIYPGDGDTKYNGKFKGLATLSADKSKSQASLKLSSVTAA |
| | | | DTAVYYCARRGTGGWYFDVWGQGTTVTVSS |
| SEQ ID | VH | E-H.39 | QVQLVESGGGVVQPGRSLRLSCAASGYAFSSSWMNWVRQAPGKG |
| NO: 3171 | | | LEWIGRIYPGDGDTKYNGKFKGRATLSADKSKSTAYLQMSSLRAE |
| | | | DTAVYYCARRGTGGWYFDVWGQGTTVTVSS |
| SEQ ID | VH | E-H.40 | QVQLVESGGGLVKPGGSLRLSCAASGYAFSSSWMNWVRQAPGKG |
| NO: 3172 | | | LEWIGRIYPGDGDTKYNGKFKGRATLSADKAKSSAYLQMNSLRAE |
| | | | DTAVYYCARRGTGGWYFDVWGQGTTVTVSS |
| SEQ ID | VH | E-H.41 | QVQLVESGGGLVQPGGSLRLSCSASGYAFSSSWMNWVRQAPGKG |
| NO: 3173 | | | LEWIGRIYPGDGDTKYNGKFKGRATLSADKSKSTAYLQMNSLRAE |
| | | | DTAVYYCARRGTGGWYFDVWGQGTTVTVSS |
| SEQ ID | VH | E-H.42 | QVQLLESGGGLVKPGGSLRLSCAASGYAFSSSWMNWVRQAPGKG |
| NO: 3174 | | | LEWIGRIYPGDGDTKYNGKFKGRATLSADKAKSSAYLQMNSLRAE |
| | | | DTAVYYCARRGTGGWYFDVWGQGTTVTVSS |
| SEQ ID | VH | E-H.43 | EVQLVESGGGLVQPGGSLRLSCSASGYAFSSSWMNWVRQAPGKG |
| NO: 3175 | | | LEWIGRIYPGDGDTKYNGKFKGRATLSADKSKSTAYLQMSSLRAE |
| | | | DTAVYYCARRGTGGWYFDVWGQGTTVTVSS |
| SEQ ID | VH | E-H.44 | QVQLQESGPGLVKPSDTLSLTCAASGYAFSSSWMNWVRQPPGKGL |
| NO: 3176 | | | EWIGRIYPGDGDTKYNGKFKGRATLSADKSKSQASLKLSSVTAVD |
| | | | TAVYYCARRGTGGWYFDVWGQGTTVTVSS |
| SEQ ID | VH | E-H.45 | QVQLQESGPGLVKPSQTLSLTCAASGYAFSSSWMNWVRQPPGKGL |
| NO: 3177 | | | EWIGRIYPGDGDTKYNGKFKGRATLSADKSKSQASLKLSSVTAVD |
| | | | TAVYYCARRGTGGWYFDVWGQGTTVTVSS |
| SEQ ID | VH | E-H.46 | EVQLVESGGGLVQPGGSLRLSCSASGYAFSSSWMNWVRQAPGKG |
| NO: 3178 | | | LEWIGRIYPGDGDTKYNGKFKGRATLSADKSKSTAYVQMSSLRAE |
| | | | DTAVYYCARRGTGGWYFDVWGQGTTVTVSS |
| SEQ ID | VH | E-H.47 | QVQLVDSGGGVVQPGRSLRLSCAASGYAFSSSWMNWVRQAPGK |
| NO: 3179 | | | GLEWIGRIYPGDGDTKYNGKFKGRATLSADKSKSTAYLQMNSLRA |
| | | | EDTAVYYCARRGTGGWYFDVWGQGTTVTVSS |
| SEQ ID | VH | E-H.48 | QVQLVESGGGVVQPGRSLRLSCAASGYAFSSSWMNWVRQAPGKG |
| NO: 3180 | | | LEWIGRIYPGDGDTKYNGKFKGRATLSADKSKSTAYLQMNSLRAE |
| | | | GTAVYYCARRGTGGWYFDVWGQGTTVTVSS |
| SEQ ID | VH | E-H.49 | QVQLVESGGGVVQPGRSLRLSCAASGYAFSSSWMNWVRQAPGKG |
| NO: 3181 | | | LEWIGRIYPGDGDTKYNGKFKGRATLSADKSKSTAYLQMNSLRAE |
| | | | DTAVYYCARRGTGGWYFDVWGQGTTVTVSS |
| SEQ ID | VH | E-H.50 | EVQLVESGGGLVQPGGSLRLSCAASGYAFSSSWMNWVRQAPGKG |
| NO: 3182 | | | LEWIGRIYPGDGDTKYNGKFKGRATLSADKSKSTAYLQMNSLRAE |
| | | | DTAVYYCARRGTGGWYFDVWGQGTTVTVSS |

[0811] In some embodiments, the anti-TCRβ V5 antibody molecule comprises a VH and/or a VL of an antibody described in Table 10, or a sequence with at least 80%, 85%, 90%, 95%, 96%, 97%, 98%, 99% or more identity thereto.

[0812] In some embodiments, the anti-TCRβ V5 antibody molecule comprises a VH and a VL of an antibody described in Table 10, or a sequence with at least 80%, 85%, 90%, 95%, 96%, 97%, 98%, 99% or more identity thereto.

[0813] In some embodiments, the anti-TCRβ V5 antibody molecule comprises a VH and/or a VL of an antibody described in Table 11, or a sequence with at least 80%, 85%, 90%, 95%, 96%, 97%, 98%, 99% or more identity thereto.

[0814] In some embodiments, the anti-TCRβ V5 antibody molecule comprises a VH and a VL of an antibody described in Table 11, or a sequence with at least 80%, 85%, 90%, 95%, 96%, 97%, 98%, 99% or more identity thereto.

### Anti-TCRβ V10 Antibodies

[0815] Accordingly, in one aspect, the disclosure provides an anti-TCRβV antibody molecule that binds to a human TCRβ V10 subfamily member. In some embodiments, TCRβ V10 subfamily is also known as TCRβ V12. In some embodiments, the TCRβ V10 subfamily comprises: TCRβ V10-1*01, TCRβ V10-1*02, TCRβ V10-3*01 or TCRβ V10-2*01, or a variant thereof.

[0816] Exemplary anti-TCRβ V10 antibodies of the disclosure are provided in Table 12. In some embodiments, the anti-TCRβ V10 is antibody D, e.g., humanized antibody D (antibody D-H), as provided in Table 12. In some embodiments, antibody D comprises one or more (e.g., three) light chain CDRs and/or one or more (e.g., three) heavy chain CDRs provided in Table 12, or a sequence with at least 95% identity thereto. In some embodiments, antibody D comprises a variable heavy chain (VH) and/or a variable light chain (VL) provided in Table 12, or a sequence with at least 95% identity thereto.

TABLE 12
Amino acid sequences for anti TCRβ V10 antibodies
Amino acid and nucleotide sequences for murine and humanized antibody molecules which bind to
TCRBV 10 (e.g., TCRBV 10-1, TCRBV 10-2 or TCRBV 10-3). The amino acid the heavy and light
chain CDRs, and the amino acid and nucleotide sequences of the heavy and light chain variable
regions, and the heavy and light chains are shown.
Murine antibody D, also referred to as S511 antibody

| | | |
|---|---|---|
| SEQ ID NO: 1288 | HC CDR1 (Kabat) | SYGMS |
| SEQ ID NO: 1289 | HC CDR2 (Kabat) | LISSGGSYTYYTDSVKG |
| SEQ ID NO: 1290 | HC CDR3 (Kabat) | HGGNFFDY |
| SEQ ID NO: 1291 | HC CDR1 (Chothia) | GFTFRSY |
| SEQ ID NO: 1292 | HC CDR2 (Chothia) | SSGGSY |
| SEQ ID NO: 1290 | HC CDR3 (Chothia) | HGGNFFDY |
| SEQ ID NO: 1293 | HC CDR1 (Combined) | GFTFRSYGMS |
| SEQ ID NO: 1289 | HC CDR2 (Combined) | LISSGGSYTYYTDSVKG |
| SEQ ID NO: 1290 | HC CDR3 (Combined) | HGGNFFDY |
| SEQ ID NO: 1294 | LC CDR1 (Kabat) | SVSSSVSYMH |
| SEQ ID NO: 1295 | LC CDR2 (Kabat) | DTSKLAS |
| SEQ ID NO: 1296 | LC CDR3 (Kabat) | QQWSSNPQYT |
| SEQ ID NO: 1297 | LC CDR1 (Chothia) | SSSVSY |
| SEQ ID NO: 1295 | LC CDR2 (Chothia) | DTSKLAS |
| SEQ ID NO: 1296 | LC CDR3 (Chothia) | QQWSSNPQYT |
| SEQ ID NO: 1294 | LC CDR1 (Combined) | SVSSSVSYMH |
| SEQ ID NO: 1295 | LC CDR2 (Combined) | DTSKLAS |
| SEQ ID NO: 1296 | LC CDR3 (Combined) | QQWSSNPQYT |
| SEQ ID NO: 3183 | VH | EVQLVESGGDLVKPGGSLKLSCAVSGFTFRSYGM |
| | | SWVRQTPDKRLEWVALISSGGSYTYYTDSVKGR |
| | | FTISRDNAKNTLYLQMSSLKSEDTAIYYCSRHGG |
| | | NFFDYWGQGTTLTVSS |
| SEQ ID NO: 3184 | VL | QIVLTQSPSIMSASPGEKVTMTCSVSSSVSYMHW |
| | | YQQKSGTSPKRWIYDTSKLASGVPARFSGSGSGT |
| | | SYSLTISSMEAEDAATYYCQQWSSNPQYTFGGGT |
| | | KLEIK |

Humanized antibody D (D-H antibody)
Variable light chain (VL)

| | | | |
|---|---|---|---|
| SEQ ID | VL | D-H.1 | DIVLTQSPAFLSVTPGEKVTITCSVSSSVSYMHWYQQKPDQAPKLLI |
| NO: 3185 | | | YDTSKLASGVPSRFSGSGSGTDYTFTISSLEAEDAATYYCQQWSSN |
| | | | PQYTFGQGTKLEIK |
| SEQ ID | VL | D-H.2 | AIQLTQSPSSLSASVGDRVTITCSVSSSVSYMHWYQQKPGKAPKLLI |
| NO: 3186 | | | YDTSKLASGVPSRFSGSGSGTDYTLTISSLQPEDFATYYCQQWSSN |
| | | | PQYTFGQGTKLEIK |
| SEQ ID | VL | D-H.3 | DIQLTQSPSFLSASVGDRVTITCSVSSSVSYMHWYQQKPGKAPKLLI |
| NO: 3187 | | | YDTSKLASGVPSRFSGSGSGTEYTLTISSLQPEDFATYYCQQWSSNP |
| | | | QYTFGQGTKLEIK |
| SEQ ID | VL | D-H.4 | DIQLTQSPSSLSASVGDRVTITCSVSSSVSYMHWYQQKPGKAPKLLI |
| NO: 3188 | | | YDTSKLASGVPSRFSGSGSGTDYTLTISSLQPEDFATYYCQQWSSN |
| | | | PQYTFGQGTKLEIK |
| SEQ ID | VL | D-H.5 | DIQLTQSPSSVSASVGDRVTITCSVSSSVSYMHWYQQKPGKAPKLL |
| NO: 3189 | | | IYDTSKLASGVPSRFSGSGSGTDYTLTISSLQPEDFATYYCQQWSSN |
| | | | PQYTFGQGTKLEIK |
| SEQ ID | VL | D-H.6 | DIQLTQSPSSLSASVGDRVTITCSVSSSVSYMHWYQQKPGKVPKLLI |
| NO: 3190 | | | YDTSKLASGVPSRFSGSGSGTDYTLTISSLQPEDVATYYCQQWSSN |
| | | | PQYTFGQGTKLEIK |
| SEQ ID | VL | D-H.7 | DIQLTQSPSSLSASVGDRVTITCSVSSSVSYMHWYQQKPGQAPKLLI |
| NO: 3191 | | | YDTSKLASGVPSRFSGSGSGTDYTLTISSLQPEDVATYYCQQWSSN |
| | | | PQYTFGQGTKLEIK |
| SEQ ID | VL | D-H.8 | EIVLTQSPDFQSVTPKEKVTITCSVSSSVSYMHWYQQKPDQSPKLLI |
| NO: 3192 | | | YDTSKLASGVPSRFSGSGSGTDYTLTINSLEAEDAATYYCQQWSSN |
| | | | PQYTFGQGTKLEIK |
| SEQ ID | VL | D-H.9 | AIRLTQSPFSLSASVGDRVTITCSVSSSVSYMHWYQQKPAKAPKLFI |
| NO: 3193 | | | YDTSKLASGVPSRFSGSGSGTDYTLTISSLQPEDFATYYCQQWSSN |
| | | | PQYTFGQGTKLEIK |
| SEQ ID | VL | D-H.10 | DIQLTQSPSSLSASVGDRVTITCSVSSSVSYMHWYQQKPGKAPKLLI |
| NO: 3194 | | | YDTSKLASGVPSRFSGSGSGTDYTFTISSLQPEDIATYYCQQWSSNP |
| | | | QYTFGQGTKLEIK |
| SEQ ID | VL | D-H.11 | EIVLTQSPATLSLSPGERATLSCSVSSSVSYMHWYQQKPGQAPKLLI |
| NO: 3195 | | | YDTSKLASGIPARFSGSGSGTDYTLTISSLEPEDFAVYYCQQWSSNP |
| | | | QYTFGQGTKLEIK |
| SEQ ID | VL | D-H.12 | DIQLTQSPSTLSASVGDRVTITCSVSSSVSYMHWYQQKPGKAPKLL |
| NO: 3196 | | | IYDTSKLASGVPSRFSGSGSGTEYTLTISSLQPDDFATYYCQQWSSN |
| | | | PQYTFGQGTKLEIK |
| SEQ ID | VL | D-H.13 | DIQLTQSPSSLSASVGDRVTITCSVSSSVSYMHWYQQKPGKTPKLLI |
| NO: 3197 | | | YDTSKLASGIPSRFSGSGSGTDYTLTIRSLQPEDFATYYCQQWSSNP |
| | | | QYTFGQGTKLEIK |
| SEQ ID | VL | D-H.14 | EIVLTQSPPTLSLSPGERVTLSCSVSSSVSYMHWYQQKPGQAPKLLI |
| NO: 3198 | | | YDTSKLASGIPARFSGSGSGTDYTLTISSLQPEDFAVYYCQQWSSNP |
| | | | QYTFGQGTKLEIK |
| SEQ ID | VL | D-H.15 | DIQLTQSPSSLSASVGDRVTITCSVSSSVSYMHWYQQKPGKAPKRL |
| NO: 3199 | | | IYDTSKLASGVPSRFSGSGSGTEYTLTISSLQPEDFATYYCQQWSSN |
| | | | PQYTFGQGTKLEIK |
| SEQ ID | VL | D-H.16 | EIVLTQSPATLSLSPGERATLSCSVSSSVSYMHWYQQKPGQAPKLLI |
| NO: 3200 | | | YDTSKLASGIPARFSGSGPGTDYTLTISSLEPEDFAVYYCQQWSSNP |
| | | | QYTFGQGTKLEIK |
| SEQ ID | VL | D-H.17 | EIVLTQSPATLSLSPGERATLSCSVSSSVSYMHWYQQKPGQAPKLLI |
| NO: 3201 | | | YDTSKLASGIPARFSGSGSGTDYTLTISRLEPEDFAVYYCQQWSSNP |
| | | | QYTFGQGTKLEIK |
| SEQ ID | VL | D-H.18 | EIVLTQSPATLSLSPGERATLSCSVSSSVSYMHWYQQKPGQAPKLLI |
| NO: 3202 | | | YDTSKLASGIPARFSGSGSGTDYTLTISSLQPEDFAVYYCQQWSSNP |
| | | | QYTFGQGTKLEIK |
| SEQ ID | VL | D-H.19 | EIVLTQSPATLSVSPGERATLSCSVSSSVSYMHWYQQKPGQAPKLL |
| NO: 3203 | | | IYDTSKLASGIPARFSGSGSGTEYTLTISSLQSEDFAVYYCQQWSSN |
| | | | PQYTFGQGTKLEIK |
| SEQ ID | VL | D-H.20 | EIVLTQSPATLSVSPGERATLSCSVSSSVSYMHWYQQKPGQAPKLL |
| NO: 3204 | | | IYDTSKLASGIPARFSGSGSGTEYTLTISILQSEDFAVYYCQQWSSN |
| | | | PQYTFGQGTKLEIK |
| SEQ ID | VL | D-H.21 | EIVLTQSPPTLSLSPGERVTLSCSVSSSVSYMHWYQQKPGQAPKLLI |
| NO: 3205 | | | YDTSKLASSIPARFSGSGSGTDYTLTISSLQPEDFAVYYCQQWSSNP |
| | | | QYTFGQGTKLEIK |
| SEQ ID | VL | D-H.22 | DIQLTQSPSSLSASVGDRVTITCSVSSSVSYMHWYQQKPGKAPKSLI |
| NO: 3206 | | | YDTSKLASGVPSRFSGSGSGTDYTLTISSLQPEDFATYYCQQWSSN |
| | | | PQYTFGQGTKLEIK |
| SEQ ID | VL | D-H.23 | DIQLTQSPSSLSASVGDRVTITCSVSSSVSYMHWYQQKPGKAPKRL |
| NO: 3207 | | | IYDTSKLASGVPSRFSGSGSGTEYTLTISNLQPEDFATYYCQQWSSN |
| | | | PQYTFGQGTKLEIK |
| SEQ ID | VL | D-H.24 | DIQLTQSPSAMSASVGDRVTITCSVSSSVSYMHWYQQKPGKVPKR |
| NO: 3208 | | | LIYDTSKLASGVPSRFSGSGSGTEYTLTISSLQPEDFATYYCQQWSS |
| | | | NPQYTFGQGTKLEIK |
| SEQ ID | VL | D-H.25 | EIVLTQSPATLSLSPGERATLSCSVSSSVSYMHWYQQKPGQAPKLLI |
| NO: 3209 | | | YDTSKLASGIPDRFSGSGSGTDYTLTISRLEPEDFAVYYCQQWSSNP |
| | | | QYTFGQGTKLEIK |
| SEQ ID | VL | D-H.26 | EIVLTQSPATLSLSPGERATLSCSVSSSVSYMHWYQQKPGLAPKLLI |
| NO: 3210 | | | YDTSKLASGIPDRFSGSGSGTDYTLTISRLEPEDFAVYYCQQWSSNP |
| | | | QYTFGQGTKLEIK |
| SEQ ID | VL | D-H.27 | EIVLTQSPGTLSLSPGERATLSCSVSSSVSYMHWYQQKPGQAPKLLI |
| NO: 3211 | | | YDTSKLASGIPDRFSGSGSGTDYTLTISRLEPEDFAVYYCQQWSSNP |
| | | | QYTFGQGTKLEIK |
| SEQ ID | VL | D-H.28 | DIQLTQSPSSLSASVGDRVTITCSVSSSVSYMHWYQQKPGKAPKSLI |
| NO: 3212 | | | YDTSKLASGVPSKFSGSGSGTDYTLTISSLQPEDFATYYCQQWSSN |
| | | | PQYTFGQGTKLEIK |
| SEQ ID | VL | D-H.29 | DIQLTQSPSSLSASVGDRVTITCSVSSSVSYMHWYQQKPEKAPKSLI |
| NO: 3213 | | | YDTSKLASGVPSRFSGSGSGTDYTLTISSLQPEDFATYYCQQWSSN |
| | | | PQYTFGQGTKLEIK |
| SEQ ID | VL | D-H.30 | DIVLTQSPDSLAVSLGERATINCSVSSSVSYMHWYQQKPGQPPKLL |
| NO: 3214 | | | IYDTSKLASGVPDRFSGSGSGTDYTLTISSLQAEDVAVYYCQQWSS |
| | | | NPQYTFGQGTKLEIK |
| SEQ ID | VL | D-H.31 | EIVLTQTPLSLSITPGEQASMSCSVSSSVSYMHWYLQKARPVPKLLI |
| NO: 3215 | | | YDTSKLASGVPDRFSGSGSGTDYTLKISRVEAEDFGVYYCQQWSS |
| | | | NPQYTFGQGTKLEIK |
| SEQ ID | VL | D-H.32 | EIVLTQTPLSLSITPGEQASISCSVSSSVSYMHWYLQKARPVPKLLIY |
| NO: 3216 | | | DTSKLASGVPDRFSGSGSGTDYTLKISRVEAEDFGVYYCQQWSSNP |
| | | | QYTFGQGTKLEIK |
| SEQ ID | VL | D-H.33 | DIVLTQSPLSLPVTPGEPASISCSVSSSVSYMHWYLQKPGQSPKLLI |
| NO: 3217 | | | YDTSKLASGVPDRFSGSGSGTDYTLKISRVEAEDVGVYYCQQWSS |
| | | | NPQYTFGQGTKLEIK |
| SEQ ID | VL | D-H.34 | DIVLTQSPLSLPVTLGQPASISCSVSSSVSYMHWYQQRPGQSPKRLI |
| NO: 3218 | | | YDTSKLASGVPDRFSGSGSGTDYTLKISRVEAEDVGVYYCQQWSS |
| | | | NPQYTFGQGTKLEIK |
| SEQ ID | VL | D-H.35 | DIVLTQTPLSLPVTPGEPASISCSVSSSVSYMHWYLQKPGQSPKLLI |
| NO: 3219 | | | YDTSKLASGVPDRFSGSGSGTDYTLKISRVEAEDVGVYYCQQWSS |
| | | | NPQYTFGQGTKLEIK |
| SEQ ID | VL | D-H.36 | DIVLTQTPLSLSVTPGQPASISCSVSSSVSYMHWYLQKPGQSPKLLI |
| NO: 3220 | | | YDTSKLASGVPDRFSGSGSGTDYTLKISRVEAEDVGVYYCQQWSS |
| | | | NPQYTFGQGTKLEIK |
| SEQ ID | VL | D-H.37 | DIVLTQTPLSLSVTPGQPASISCSVSSSVSYMHWYLQKPGQPPKLLI |
| NO: 3221 | | | YDTSKLASGVPDRFSGSGSGTDYTLKISRVEAEDVGVYYCQQWSS |
| | | | NPQYTFGQGTKLEIK |
| SEQ ID | VL | D-H.38 | DIQLIQSPSFLSASVGDRVSIICSVSSSVSYMHWYLQKPGKSPKLFIY |
| NO: 3222 | | | DTSKLASGVSSRFSGRGSGTDYTLTIISLKPEDFAAYYCQQWSSNP |
| | | | QYTFGQGTKLEIK |
| SEQ ID | VL | D-H.39 | DIVLTQTPLSSPVTLGQPASISCSVSSSVSYMHWYQQRPGQPPKLLI |
| NO: 3223 | | | YDTSKLASGVPDRFSGSGAGTDYTLKISRVEAEDVGVYYCQQWSS |
| | | | NPQYTFGQGTKLEIK |
| SEQ ID | VL | D-H.40 | EITLTQSPAFMSATPGDKVNISCSVSSSVSYMHWYQQKPGEAPKFII |
| NO: 3224 | | | YDTSKLASGIPPRFSGSGYGTDYTLTINNIESEDAAYYYCQQWSSN |
| | | | PQYTFGQGTKLEIK |

Variable HEAVY chain (VH)

| | | | |
|---|---|---|---|
| SEQ ID | VH | D-H.1 | EVQLVESGGGLVKPGGSLRLSCAVSGFTFRSYGMSWVRQAPGKGL |
| NO: 3225 | | | EWVALISSGGSYTYYTDSVKGRFTISRDNSKNTLYLQMNSLKTEDT |
| | | | AVYYCSRHGGNFFDYWGQGTTVTVSS |
| SEQ ID | VH | D-H.2 | EVQLVESGGALVKPGGSLRLSCAVSGFTFRSYGMSWVRQAPGKGL |
| NO: 3226 | | | EWVALISSGGSYTYYTDSVKGRFTISRDNSKNTLYLQMNSLKTEDT |
| | | | AVYYCSRHGGNFFDYWGQGTTVTVSS |
| SEQ ID | VH | D-H.3 | EVQLVESGGGLVQPGGSLRLSCAVSGFTFRSYGMSWVRQAPGKGL |
| NO: 3227 | | | EWVALISSGGSYTYYTDSVKGRFTISRDNAKNTLYLQMNSLRAED |
| | | | TAVYYCSRHGGNFFDYWGQGTTVTVSS |
| SEQ ID | VH | D-H.4 | EVQLVESGGGLVQPGGSLRLSCAVSGFTFRSYGMSWVRQAPGKGL |
| NO: 3228 | | | EWVALISSGGSYTYYTDSVKGRFTISRDNAKNSLYLQMNSLRAED |
| | | | TAVYYCSRHGGNFFDYWGQGTTVTVSS |
| SEQ ID | VH | D-H.5 | EVQLVESGGGLVQPGGSLRLSCAVSGFTFRSYGMSWVRQAPGKGL |
| NO: 3229 | | | EWVALISSGGSYTYYTDSVKGRFTISRDNSKNSLYLQMNSLKTEDT |
| | | | AVYYCSRHGGNFFDYWGQGTTVTVSS |
| SEQ ID | VH | D-H.6 | EVQLVESGGGLVQPGGSLRLSCAVSGFTFRSYGMSWVRQAPGKGL |
| NO: 3230 | | | EWVALISSGGSYTYYTDSVKGRFTISRDNAKNSLYLQMNSLRAED |
| | | | MAVYYCSRHGGNFFDYWGQGTTVTVSS |
| SEQ ID | VH | D-H.7 | EVQLVESGGGLVQPGGSLRLSCAVSGFTFRSYGMSWVRQAPGKGL |
| NO: 3231 | | | EWVALISSGGSYTYYTDSVKGQFTISRDNAKNTLYLQMNSLRAED |
| | | | MAVYYCSRHGGNFFDYWGQGTTVTVSS |
| SEQ ID | VH | D-H.8 | EVQLVESGGGLVKPGRSLRLSCTVSGFTFRSYGMSWVRQAPGKGL |
| NO: 3232 | | | EWVALISSGGSYTYYTDSVKGRFTISRDNSKNILYLQMNSLKTEDT |
| | | | AVYYCSRHGGNFFDYWGQGTTVTVSS |
| SEQ ID | VH | D-H.9 | EVQLVESGGGLVKPGGSLRLSCAVSGFTFRSYGMSWVRQAPGKGL |
| NO: 3233 | | | EWVALISSGGSYTYYTDSVKGRFTISRDNAKNSLYLQMNSLRAED |
| | | | TAVYYCSRHGGNFFDYWGQGTTVTVSS |
| SEQ ID | VH | D-H.10 | EVQLVESGGGLVQPGGSLKLSCAVSGFTFRSYGMSWVRQASGKG |
| NO: 3234 | | | LEWVALISSGGSYTYYTDSVKGRFTISRDNSKNTLYLQMNSLKTED |
| | | | TAVYYCSRHGGNFFDYWGQGTTVTVSS |
| SEQ ID | VH | D-H.11 | QVQLVESGGGVVQPGGSLRLSCAVSGFTFRSYGMSWVRQAPGKG |
| NO: 3235 | | | LEWVALISSGGSYTYYTDSVKGRFTISRDNSKNTLYLQMNSLRAED |
| | | | TAVYYCSRHGGNFFDYWGQGTTVTVSS |
| SEQ ID | VH | D-H.12 | QVQLVESGGGVVQPGRSLRLSCAVSGFTFRSYGMSWVRQAPGKG |
| NO: 3236 | | | LEWVALISSGGSYTYYTDSVKGRFTISRDNSKNTLYLQMSSLRAED |
| | | | TAVYYCSRHGGNFFDYWGQGTTVTVSS |
| SEQ ID | VH | D-H.13 | EVQLVESGGGLVQPGGSLRLSCPVSGFTFRSYGMSWVRQAPGKGL |
| NO: 3237 | | | EWVALISSGGSYTYYTDSVKGRFTISRDNANNSLYLQMNSLRAED |
| | | | TAVYYCSRHGGNFFDYWGQGTTVTVSS |
| SEQ ID | VH | D-H.14 | EVQLVESGGGLVQPGRSLRLSCTVSGFTFRSYGMSWVRQAPGKGL |
| NO: 3238 | | | EWVALISSGGSYTYYTDSVKGRFTISRDNSKNILYLQMNSLKTEDT |
| | | | AVYYCSRHGGNFFDYWGQGTTVTVSS |
| SEQ ID | VH | D-H.15 | EVQLVESGGGLVQPGPSLRLSCTVSGFTFRSYGMSWVRQAPGKGL |
| NO: 3239 | | | EWVALISSGGSYTYYTDSVKGRFTISRDNSKNILYLQMNSLKTEDT |
| | | | AVYYCSRHGGNFFDYWGQGTTVTVSS |
| SEQ ID | VH | D-H.16 | EVQLVESGGGLVQPGGSLRLSCAVSGFTFRSYGMSWVRQAPGKGL |
| NO: 3240 | | | EWVALISSGGSYTYYTDSVKGRFTISRDNSKNTLYLQMNSLRAEDT |
| | | | AVYYCSRHGGNFFDYWGQGTTVTVSS |
| SEQ ID | VH | D-H.17 | EVQLVESGGGLVQPGGSLRLSCAVSGFTFRSYGMSWVRQAPGKGL |
| NO: 3241 | | | EWVALISSGGSYTYYTDSVKGRFTISRDNAKNSLYLQMNSLRDED |
| | | | TAVYYCSRHGGNFFDYWGQGTTVTVSS |
| SEQ ID | VH | D-H.18 | QVQLVESGGGLVKPGGSLRLSCAVSGFTFRSYGMSWVRQAPGKG |
| NO: 3242 | | | LEWVALISSGGSYTYYTDSVKGRFTISRDNAKNSLYLQMNSLRAE |
| | | | DTAVYYCSRHGGNFFDYWGQGTTVTVSS |
| SEQ ID | VH | D-H.19 | QVQLVESGGGVVQPGRSLRLSCAVSGFTFRSYGMSWVRQAPGKG |
| NO: 3243 | | | LEWVALISSGGSYTYYTDSVKGRFTISRDNSKNTLYLQMNSLRAED |
| | | | TAVYYCSRHGGNFFDYWGQGTTVTVSS |
| SEQ ID | VH | D-H.20 | EVQLLESGGGLVQPGGSLRLSCAVSGFTFRSYGMSWVRQAPGKGL |
| NO: 3244 | | | EWVALISSGGSYTYYTDSVKGRFTISRDNSKNTLYLQMNSLRAEDT |
| | | | AVYYCSRHGGNFFDYWGQGTTVTVSS |
| SEQ ID | VH | D-H.21 | EVQLVESGGGLVQPGGSLRLSCAVSGFTFRSYGMSWVRQAPGKGL |
| NO: 3245 | | | EWVALISSGGSYTYYTDSVKGRFTISRHNSKNTLYLQMNSLRAEDT |
| | | | AVYYCSRHGGNFFDYWGQGTTVTVSS |
| SEQ ID | VH | D-H.22 | EVQLVESGGGLIQPGGSLRLSCAVSGFTFRSYGMSWVRQPPGKGL |
| NO: 3246 | | | EWVALISSGGSYTYYTDSVKGRFTISRDNSKNTLYLQMNSLRAEDT |
| | | | AVYYCSRHGGNFFDYWGQGTTVTVSS |
| SEQ ID | VH | D-H.23 | EVQLVESGGGLIQPGGSLRLSCAVSGFTFRSYGMSWVRQAPGKGL |
| NO: 3247 | | | EWVALISSGGSYTYYTDSVKGRFTISRDNSKNTLYLQMNSLRAEDT |
| | | | AVYYCSRHGGNFFDYWGQGTTVTVSS |
| SEQ ID | VH | D-H.24 | EVQLVESGGGLVQPGRSLRLSCAVSGFTFRSYGMSWVRQAPGKGL |
| NO: 3248 | | | EWVALISSGGSYTYYTDSVKGRFTISRDNAKNSLYLQMNSLRAED |
| | | | TALYYCSRHGGNFFDYWGQGTTVTVSS |
| SEQ ID | VH | D-H.25 | QVQLVESGGGVVQPGRSLRLSCAVSGFTFRSYGMSWVRQAPGKG |
| NO: 3249 | | | LEWVALISSGGSYTYYTDSVKGRFTISRDNSKNRLYLQMNSLRAE |
| | | | DTAVYYCSRHGGNFFDYWGQGTTVTVSS |
| SEQ ID | VH | D-H.26 | QVQLVESGGGVVQPGRSLRLSCAVSGFTFRSYGMSWVRQAPGKG |
| NO: 3250 | | | LEWVALISSGGSYTYYTDSVKGRFTISRDNSKNTLYLQMNSLRAEG |
| | | | TAVYYCSRHGGNFFDYWGQGTTVTVSS |
| SEQ ID | VH | D-H.27 | QVQLVESGGGVVQPGRSLRLSCAVSGFTFRSYGMSWVRQAPGKG |
| NO: 3251 | | | LEWVALISSGGSYTYYTDSVKGRFAISRDNSKNTLYLQMNSLRAE |
| | | | DTAVYYCSRHGGNFFDYWGQGTTVTVSS |
| SEQ ID | VH | D-H.28 | QVQLVDSGGGVVQPGRSLRLSCAVSGFTFRSYGMSWVRQAPGKG |
| NO: 3252 | | | LEWVALISSGGSYTYYTDSVKGRFTISRDNSKNTLYLQMNSLRAED |
| | | | TAVYYCSRHGGNFFDYWGQGTTVTVSS |
| SEQ ID | VH | D-H.29 | EVQLVESGGGVVRPGGSLRLSCAVSGFTFRSYGMSWVRQAPGKG |
| NO: 3253 | | | LEWVALISSGGSYTYYTDSVKGRFTISRDNAKNSLYLQMNSLRAE |
| | | | DTALYHCSRHGGNFFDYWGQGTTVTVSS |
| SEQ ID | VH | D-H.30 | EVQLVESGGVVVQPGGSLRLSCAVSGFTFRSYGMSWVRQAPGKG |
| NO: 3254 | | | LEWVALISSGGSYTYYTDSVKGRFTISRDNSKNSLYLQMNSLRAED |
| | | | TALYYCSRHGGNFFDYWGQGTTVTVSS |
| SEQ ID | VH | D-H.31 | EVQLVESGGGVVQPGGSLRLSCAVSGFTFRSYGMSWVRQAPGKG |
| NO: 3255 | | | LEWVALISSGGSYTYYTDSVKGRFTISRDNSKNSLYLQMNSLRTED |
| | | | TALYYCSRHGGNFFDYWGQGTTVTVSS |
| SEQ ID | VH | D-H.32 | EVQLVESGGVVVQPGGSLRLSCAVSGFTFRSYGMSWVRQAPGKG |
| NO: 3256 | | | LEWVALISSGGSYTYYTDSVKGRFTISRDNSKNSLYLQMNSLRTED |
| | | | TALYYCSRHGGNFFDYWGQGTTVTVSS |
| SEQ ID | VH | D-H.33 | EVQLVETGGGLIQPGGSLRLSCAVSGFTFRSYGMSWVRQAPGKGL |
| NO: 3257 | | | EWVALISSGGSYTYYTDSVKGRFTISRDNSKNTLYLQMNSLRAEDT |
| | | | AVYYCSRHGGNFFDYWGQGTTVTVSS |
| SEQ ID | VH | D-H.34 | EVQLVESGGGLVQPGGSLRLSCAVSGFTFRSYGMSWVRQATGKG |
| NO: 3258 | | | LEWVALISSGGSYTYYTDSVKGRFTISRENAKNSLYLQMNSLRAG |
| | | | DTAVYYCSRHGGNFFDYWGQGTTVTVSS |
| SEQ ID | VH | D-H.35 | EVQLVESRGVLVQPGGSLRLSCAVSGFTFRSYGMSWVRQAPGKGL |
| NO: 3259 | | | EWVALISSGGSYTYYTDSVKGRFTISRDNSKNTLHLQMNSLRAEDT |
| | | | AVYYCSRHGGNFFDYWGQGTTVTVSS |
| SEQ ID | VH | D-H.36 | EVQLVESGGGLVQPGRSLRLSCAVSGFTFRSYGMSWVRQAPGKGL |
| NO: 3260 | | | EWVALISSGGSYTYYTDSVKGRFTISRDNAKNSLYLQMNSLRAED |
| | | | MALYYCSRHGGNFFDYWGQGTTVTVSS |
| SEQ ID | VH | D-H.37 | QVQLVESGGGLVQPGGSLRLSCSVSGFTFRSYGMSWVRQAPGKGL |
| NO: 3261 | | | EWVALISSGGSYTYYTDSVKGRFTISRDNSKNTLYLQMNSLRAEDT |
| | | | AVYYCSRHGGNFFDYWGQGTTVTVSS |
| SEQ ID | VH | D-H.38 | EVQLVESGGGLVQPGGSLRLSCSVSGFTFRSYGMSWVRQAPGKGL |
| NO: 3262 | | | EWVALISSGGSYTYYTDSVKGRFTISRDNSKNTLYLQMSSLRAEDT |
| | | | AVYYCSRHGGNFFDYWGQGTTVTVSS |
| SEQ ID | VH | D-H.39 | QVQLVESGGGVVQPGRSLRLSCAVSGFTFRSYGMSWVRQAPGKG |
| NO: 3263 | | | LEWVALISSGGSYTYYTDSVKGRFTISRDNSTNTLFLQMNSLRAED |
| | | | TAVYYCSRHGGNFFDYWGQGTTVTVSS |
| SEQ ID | VH | D-H.40 | QVQLLESGGGLVKPGGSLRLSCAVSGFTFRSYGMSWVRQAPGKGL |
| NO: 3264 | | | EWVALISSGGSYTYYTDSVKGRFTISRDNAKNSLYLQMNSLRAED |
| | | | TAVYYCSRHGGNFFDYWGQGTTVTVSS |
| SEQ ID | VH | D-H.41 | EVQLVESGEGLVQPGGSLRLSCAVSGFTFRSYGMSWVRQAPGKGL |
| NO: 3265 | | | EWVALISSGGSYTYYTDSVKGRFTISRDNSKNTLYLQMGSLRAED |
| | | | MAVYYCSRHGGNFFDYWGQGTTVTVSS |
| SEQ ID | VH | D-H.42 | EVQLVESGGGLVQPGGSLRLSCAVSGFTFRSYGMSWVRQAPGKGL |
| NO: 3266 | | | EWVALISSGGSYTYYTDSVKGRFTISRDNSKNTLYLQMGSLRAED |
| | | | MAVYYCSRHGGNFFDYWGQGTTVTVSS |
| SEQ ID | VH | D-H.43 | EVQLVESGGGLVQPGGSLRLSCSVSGFTFRSYGMSWVRQAPGKGL |
| NO: 3267 | | | EWVALISSGGSYTYYTDSVKGRFTISRDNSKNTLYVQMSSLRAEDT |
| | | | AVYYCSRHGGNFFDYWGQGTTVTVSS |
| SEQ ID | VH | D-H.44 | EVQLVESGGGLVQPGGSLRLSCAVSGFTFRSYGMSWVRQAPGKGL |
| NO: 3268 | | | EWVALISSGGSYTYYTDSVKGRFIISRDNSRNSLYLQKNRRRAEDM |
| | | | AVYYCSRHGGNFFDYWGQGTTVTVSS |
| SEQ ID | VH | D-H.45 | EVQLVESGGGLVQPGGSLRLSCAVSGFTFRSYGMSWVHQAPGKG |
| NO: 3269 | | | LEWVALISSGGSYTYYTDSVKGRFIISRDNSRNTLYLQTNSLRAE |
| | | | DTAVYYCSRHGGNFFDYWGQGTTVTVSS |
| SEQ ID | VH | D-H.46 | EVHLVESGGGLVQPGGALRLSCAVSGFTFRSYGMSWVRQATGKG |
| NO: 3270 | | | LEWVALISSGGSYTYYTDSVKGRFTISRENAKNSLYLQMNSLRAG |
| | | | DTAVYYCSRHGGNFFDYWGQGTTVTVSS |
| SEQ ID | VH | D-H.47 | EVQLVESGGGLVQPRGSLRLSCAVSGFTFRSYGMSWVRQAPGKGL |
| NO: 3271 | | | EWVALISSGGSYTYYTDSVKGRFTISRDNSKNTLYLQMNNLRAEG |
| | | | TAVYYCSRHGGNFFDYWGQGTTVTVSS |
| SEQ ID | VH | D-H.48 | EVQLVESGGGLVQPRGSLRLSCAVSGFTFRSYGMSWVRQAPGKGL |
| NO: 3272 | | | EWVALISSGGSYTYYTDSVKGRFTISRDNSKNTLYLQMNNLRAEG |
| | | | TAAYYCSRHGGNFFDYWGQGTTVTVSS |
| SEQ ID | VH | D-H.49 | QVQLVQSGAEVKKPGASVKVSCKVSGFTFRSYGMSWVRQAPGKG |
| NO: 3273 | | | LEWVALISSGGSYTYYTDSVKGRFTITRDNSTNTLYMELSSLRSED |
| | | | TAVYYCSRHGGNFFDYWGQGTTVTVSS |
| SEQ ID | VH | D-H.50 | QVQLVQSGSELKKPGASVKVSCKVSGFTFRSYGMSWVRQAPGQG |
| NO: 3274 | | | LEWVALISSGGSYTYYTDSVKGRFVISRDNSVNTLYLQISSLKAE |
| | | | DTAVYYCSRHGGNFFDYWGQGTTVTVSS |

[0817] In some embodiments, the anti-TCRβ V10 antibody molecule comprises a VH or a VL of an antibody described in Table 12, or a sequence with at least 80%, 85%, 90%, 95%, 96%, 97%, 98%, 99% or more identity thereto.

[0818] In some embodiments, the anti-TCRβ V10 antibody molecule comprises a VH and a VL of an antibody described in Table 12, or a sequence with at least 80%, 85%, 90%, 95%, 96%, 97%, 98%, 99% or more identity thereto.

### Additional Anti-TCRVβ Antibodies

[0819] Additional exemplary anti-TCRβV antibodies of the disclosure are provided in Table 13. In some embodiments, the anti-TCRβV antibody is a humanized antibody, e.g., as provided in Table 13. In some embodiments, the anti-TCRβV antibody comprises one or more (e.g., all three) of a LC CDR1, LC CDR2, and LC CDR3 provided in Table 13; and/or one or more (e.g., all three) of a HC CDR1, HC CDR2, and HC CDR3 provided in Table 13, or a sequence with at least 95% identity thereto. In some embodiments, the anti-TCRβV antibody comprises a variable heavy chain (VH) and/or a variable light chain (VL) provided in Table 13, or a sequence with at least 95% identity thereto.

TABLE 13
Amino acid sequences for additional anti-TCRβ V antibodies
Amino acid and nucleotide sequences for murine and humanized antibody molecules which bind to
various TCRVB families are disclosed. The amino acid the heavy and light chain CDRs, and the
amino acid and nucleotide sequences of the heavy and light chain variable regions, and the
heavy and light chains are shown. Antibodies disclosed in the table include, MPB2D5,
CAS1.1.3, IMMU222, REA1062, and JOVI-3. MPB2D5 binds human TCRβV 20-1 (TCRβV2 per old
nomenclature). CAS1.1.3 binds human TCRβV 27 (TCRβV14 per old nomenclature). IMMU 222
binds human TCRβV 6-5, TCRβV 6-6, or TCRβV 6-9 (TCRβV13.1 per old nomenclature).
REA1062 binds human TCRβV 5-1). JOVI-3 binds human TCRβV 28 (TCRβV3.1 per old
nomenclature). IMMU546 binds human TCRβV 2.
MPB2D5 (murine), also referred to here as BJ1188, BJ1190 and REA654; or Antibody G
Binds to human TCRVβ 20-1

| | | |
|---|---|---|
| SEQ ID NO: 1102 | HC CDR1 (Kabat) | SAYMH |
| SEQ ID NO: 1103 | HC CDR2 (Kabat) | RIDPATGKTKYAPKFQA |
| SEQ ID NO: 1104 | HC CDR3 (Kabat) | SLNWDYGLDY |
| SEQ ID NO: 1105 | HC CDR1 (Chothia) | GFNIKSA |
| SEQ ID NO: 1106 | HC CDR2 (Chothia) | DPATGK |
| SEQ ID NO: 1104 | HC CDR3 (Chothia) | SLNWDYGLDY |
| SEQ ID NO: 3640 | HC CDR1 (Combined) | GFNIKSAYMH |
| SEQ ID NO: 1103 | HC CDR2 (Combined) | RIDPATGKTKYAPKFQA |
| SEQ ID NO: 1104 | HC CDR3 (Combined) | SLNWDYGLDY |
| SEQ ID NO: 1107 | LC CDR1 (Kabat) | RASKSVSILGTHLIH |
| SEQ ID NO: 1108 | LC CDR2 (Kabat) | AASNLES |
| SEQ ID NO: 1109 | LC CDR3 (Kabat) | QQSIEDPWT |
| SEQ ID NO: 1110 | LC CDR1 (Chothia) | SKSVSILGTHL |
| SEQ ID NO: 1108 | LC CDR2 (Chothia) | AASNLES |
| SEQ ID NO: 1109 | LC CDR3 (Chothia) | QQSIEDPWT |
| SEQ ID NO: 1107 | LC CDR1 (Combined) | RASKSVSILGTHLIH |
| SEQ ID NO: 1108 | LC CDR2 (Combined) | AASNLES |
| SEQ ID NO: 1109 | LC CDR3 (Combined) | QQSIEDPWT |
| SEQ ID NO: 1111 | VL | DIVLTQSPASLAVSLGQRATISCRASKSVSILGTHLIHW |
| | | YQQKPGQPPKLLIYAASNLESGVPARFSGSGSETVFTL |
| | | NIHPVEEEDAATYFCQQSIEDPWTFGGGTKLGIK |
| SEQ ID NO: 1112 | VH | EVQLQQSVADLVRPGASLKLSCTASGFNIKSAYMHW |
| | | VIQRPDQGPECLGRIDPATGKTKYAPKFQAKATITADT |
| | | SSNTAYLQLSSLTSEDTAIYYCTRSLNWDYGLDYWGQ |
| | | GTSVTVSS |

VH for MPB2D5 (humanized) also referred to as Antibody G-H (humanized)
Binds to human TCRVβ 20-1

| | | |
|---|---|---|
| SEQ ID NO: 1113 | VH-1 | QVQLVQSGAEVKKPGASVKVSCKASGFNIKSAYMHW |
| | | VRQAPGQGLEWMGRIDPATGKTKYAPKFQARVTMT |
| | | ADTSTNTAYMELSSLRSEDTAVYYCARSLNWDYGLD |
| | | YWGQGTLVTVSS |
| SEQ ID NO: 1114 | VH-2 | QVQLVQSGAEVKKPGASVKVSCKASGFNIKSAYMHW |
| | | VRQAPGQEPGCMGRIDPATGKTKYAPKFQARVTMTA |
| | | DTSINTAYTELSSLRSEDTATYYCARSLNWDYGLDYW |
| | | GQGTLVTVSS |
| SEQ ID NO: 1115 | VH-3 | QVQLVQSGAEVKKPGSSVKVSCKASGFNIKSAYMHW |
| | | VRQAPGQGLEWMGRIDPATGKTKYAPKFQARVTITA |
| | | DTSTNTAYMELSSLRSEDTAVYYCARSLNWDYGLDY |
| | | WGQGTLVTVSS |
| SEQ ID NO: 1116 | VH-4 | QVQLVQSGAEVKKPGASVKVSCKASGFNIKSAYMHW |
| | | VRQAPGQRLEWMGRIDPATGKTKYAPKFQARVTITA |
| | | DTSANTAYMELSSLRSEDTAVYYCARSLNWDYGLDY |
| | | WGQGTLVTVSS |

VL for MPB2D5 (humanized) also referred to as Antibody G-H (humanized)
Binds to human TCRVβ 20-1

| | | |
|---|---|---|
| SEQ ID NO: 1117 | VL-1 | EIVLTQSPATLSLSPGERATLSCRASKSVSILGTHLIHW |
| | | YQQKPGQAPRLLIYAASNLESGIPARFSGSGSETDFTL |
| | | TISSLEPEDFAVYFCQQSIEDPFGGGTKVEIK |
| SEQ ID NO: 1118 | VL-2 | EIVLTQSPATLSLSPGERATLSCRASKSVSILGTHLIHW |
| | | YQQKPGLAPRLLIYAASNLESGIPDRFSGSGSETDFTLT |
| | | ISRLEPEDFAVYFCQQSIEDPFGGGTKVEIK |
| SEQ ID NO: 1119 | VL-3 | EIVLTQSPGTLSLSPGERATLSCRASKSVSILGTHLIHW |
| | | YQQKPGQAPRLLIYAASNLESGIPDRFSGSGSETDFTL |
| | | TISRLEPEDFAVYFCQQSIEDPFGGGTKVEIK |

CAS1.1.3 (murine) also referred to herein as BJ1460; or Antibody H
Binds to human TCRVβ 27

| | | |
|---|---|---|
| SEQ ID NO: 1120 | HC CDR1 (Kabat) | DTYMY |
| SEQ ID NO: 1121 | HC CDR2 (Kabat) | RIDPANGNTKYDPKFQD |
| SEQ ID NO: 1122 | HC CDR3 (Kabat) | GSYYYAMDY |
| SEQ ID NO: 1123 | HC CDR1 (Chothia) | GFKTEDT |
| SEQ ID NO: 1124 | HC CDR2 (Chothia) | DPANGN |
| SEQ ID NO: 1122 | HC CDR3 (Chothia) | GSYYYAMDY |
| SEQ ID NO: 1125 | HC CDR1 (Combined) | GFKTEDTYMY |
| SEQ ID NO: 1121 | HC CDR2 (Combined) | RIDPANGNTKYDPKFQD |
| SEQ ID NO: 1122 | HC CDR3 (Combined) | GSYYYAMDY |
| SEQ ID NO: 1126 | LC CDR1 (Kabat) | RASESVDSYGNSFMH |
| SEQ ID NO: 1127 | LC CDR2 (Kabat) | RASNLES |
| SEQ ID NO: 1128 | LC CDR3 (Kabat) | QQSNEDPYT |
| SEQ ID NO: 3641 | LC CDR1 (Chothia) | SESVDSYGNSF |
| SEQ ID NO: 1127 | LC CDR2 (Chothia) | RASNLES |
| SEQ ID NO: 1128 | LC CDR3 (Chothia) | QQSNEDPYT |
| SEQ ID NO: 1126 | LC CDR1 (Combined) | RASESVDSYGNSFMH |
| SEQ ID NO: 1127 | LC CDR2 (Combined) | RASNLES |
| SEQ ID NO: 1128 | LC CDR3 (Combined) | QQSNEDPYT |
| SEQ ID NO: 1129 | VL | DIVLTQSPASLAVSLGQRATISCRASESVDSYGNSFMH |
| | | WYQQKPGQPPKLLIYRASNLESGIPARFSGSGSRTDFT |
| | | LTTNPVEADDVATYYCQQSNEDPYTFGGGTKLEIK |
| SEQ ID NO: 1130 | VH | EVQLQQSGAELVKPGASVKLSCTASGFKTEDTYMYW |
| | | VKQRPEQGLEWIGRIDPANGNTKYDPKFQDKATITAD |
| | | SSSNTAYLQLSSLPSEDTAVYYCARGSYYYAMDYWG |
| | | QGTSVTVSS |

VH for CAS1.1.3 (humanized) also referred to as Antibody H-H (humanized)
Binds to human TCRVβ 27

| | | |
|---|---|---|
| SEQ ID NO: 1131 | VH-1 | QVQLVQSGAEVKKPGSSVKVSCKASGFKTEDTYMY |
| | | WVRQAPGQGLEWIGRIDPANGNTKYDPKFQDRATIT |
| | | ADSSTNTAYMELSSLRSEDTAVYYCARGSYYYAMDY |
| | | WGQGTLVTVSS |
| SEQ ID NO: 1132 | VH-2 | QVQLVQSGAEVKKPGASVKVSCKASGFKTEDTYMY |
| | | WVRQAPGQRLEWIGRIDPANGNTKYDPKFQDRATITA |
| | | DSSANTAYMELSSLRSEDTAVYYCARGSYYYAMDY |
| | | WGQGTLVTVSS |
| SEQ ID NO: 1133 | VH-3 | EVQLVESGGGLVQPGGSLKLSCAASGFKTEDTYMYW |
| | | VRQASGKGLEWIGRIDPANGNTKYDPKFQDRATISAD |
| | | SSKNTAYLQMNSLKTEDTAVYYCARGSYYYAMDYW |
| | | GQGTLVTVSS |
| SEQ ID NO: 1134 | VH-4 | EVQLVQSGAEVKKPGESLRISCKASGFKTEDTYMYW |
| | | VRQMPGKGLEWIGRIDPANGNTKYDPKFQDQATISAD |
| | | SSINTAYLQWSSLKASDTAMYYCARGSYYYAMDYW |
| | | GQGTLVTVSS |
| SEQ ID NO: 1135 | VH-5 | QVQLVQSGSELKKPGASVKVSCKASGFKTEDTYMYW |
| | | VRQAPGQGLEWIGRIDPANGNTKYDPKFQDRAVISAD |
| | | SSVNTAYLQISSLKAEDTAVYYCARGSYYYAMDYWG |
| | | QGTLVTVSS |

VL for CAS1.1.3 (humanized) also referred to as Antibody H-H (humanized)
Binds to human TCRVβ 27

| | | |
|---|---|---|
| SEQ ID NO: 1136 | VL-1 | DIVLTQSPDSLAVSLGERATINCRASESVDSYGNSFMH |
| | | WYQQKPGQPPKLLIYRASNLESGVPDRFSGSGSRTDF |
| | | TLTISSLQAEDVAVYYCQQSNEDPYTFGQGTKLEIK |
| SEQ ID NO: 1137 | VL-2 | EIVLTQSPATLSLSPGERATLSCRASESVDSYGNSFMH |
| | | WYQQKPGQAPKLLIYRASNLESGIPARFSGSGSRTDFT |
| | | LTISRLEPEDFAVYYCQQSNEDPYTFGQGTKLEIK |
| SEQ ID NO: 1138 | VL-3 | DIQLTQSPSSLSASVGDRVTITCRASESVDSYGNSFMH |
| | | WYQQKPGQAPKLLIYRASNLESGVPSRFSGSGSRTDF |
| | | TLTISSLQPEDVATYYCQQSNEDPYTFGQGTKLEIK |
| SEQ ID NO: 1139 | VL-4 | AIQLTQSPSSLSASVGDRVTITCRASESVDSYGNSFMH |
| | | WYQQKPGKAPKLLIYRASNLESGVPSRFSGSGSRTDF |
| | | TLTISSLQPEDFATYYCQQSNEDPYTFGQGTKLEIK |
| SEQ ID NO: 1140 | VL-5 | EIVLTQSPDFQSVTPKEKVTITCRASESVDSYGNSFMH |
| | | WYQQKPDQSPKLLIYRASNLESGVPSRFSGSGSRTDFT |
| | | LTINSLEAEDAATYYCQQSNEDPYTFGQGTKLEIK |

IMMU222 (murine) also referred to as BJ1461; or Antibody I
Binds to human TCRVβ 6-5, 6-6, 6-9

| | | |
|---|---|---|
| SEQ ID NO: 1141 | HC CDR1 (Kabat) | SYAMS |
| SEQ ID NO: 1142 | HC CDR2 (Kabat) | HISNGGDYIYYADTVKG |
| SEQ ID NO: 1143 | HC CDR3 (Kabat) | PSYYSDPWFFDV |
| SEQ ID NO: 1144 | HC CDR1 (Chothia) | GFTFRSY |
| SEQ ID NO: 1145 | HC CDR2 (Chothia) | SNGGDY |
| SEQ ID NO: 1143 | HC CDR3 (Chothia) | PSYYSDPWFFDV |
| SEQ ID NO: 1146 | HC CDR1 (Combined) | GFTFRSYAMS |
| SEQ ID NO: 1142 | HC CDR2 (Combined) | HISNGGDYIYYADTVKG |
| SEQ ID NO: 1143 | HC CDR3 (Combined) | PSYYSDPWFFDV |
| SEQ ID NO: 1147 | LC CDR1 (Kabat) | SAGSSVSFMH |
| SEQ ID NO: 1148 | LC CDR2 (Kabat) | DTSKLAS |
| SEQ ID NO: 1149 | LC CDR3 (Kabat) | LQGSGFPLT |
| SEQ ID NO: 1150 | LC CDR1 (Chothia) | GSSVSF |
| SEQ ID NO: 1148 | LC CDR2 (Chothia) | DTSKLAS |
| SEQ ID NO: 1149 | LC CDR3 (Chothia) | LQGSGFPLT |
| SEQ ID NO: 1147 | LC CDR1 (Combined) | SAGSSVSFMH |
| SEQ ID NO: 1148 | LC CDR2 (Combined) | DTSKLAS |
| SEQ ID NO: 1149 | LC CDR3 (Combined) | LQGSGFPLT |
| SEQ ID NO: 1151 | VL | ENVLTQSPAIMSASPGEKVTMTCSAGSSVSFMHWYQ |
| | | QKSSTSPKLWIYDTSKLASGVPGRFSGSGSGNSFSLTIS |
| | | SMEAEDVAIYYCLQGSGFPLTFGSGTKLEIK |
| SEQ ID NO: 1152 | VH | DVKLVESGEGLVKPGGSLKLSCAASGFTFRSYAMSW |
| | | VRQTPEKRLEWVAHISNGGDYIYYADTVKGRFTISRD |
| | | NARNTLYLQMSSLKSEDTAMYYCTRPSYYSDPWFFD |
| | | VWGTGTTVTVSS |

VH for IMMU222 (humanized) also referred to as Antibody I-H
Binds to human TCRVβ 6-5, 6-6, 6-9

| | | |
|---|---|---|
| SEQ ID NO: 1153 | VH-1 | EVQLVESGGGLVQPGGSLRLSCAASGFTFRSYAMSW |
| | | VRQAPGKGLEWVAHISNGGDYIYYADTVKGRFTISRD |
| | | NAKNSLYLQMNSLRAEDTAVYYCTRPSYYSDPWFFD |
| | | VWGQGTTVTVSS |
| SEQ ID NO: 1154 | VH-2 | QVQLVESGGGVVQPGRSLRLSCAASGFTFRSYAMSW |
| | | VRQAPGKGLEWVAHISNGGDYIYYADTVKGRFTISRD |
| | | NSKNTLYLQMSSLRAEDTAVYYCTRPSYYSDPWFFD |
| | | VWGQGTTVTVSS |
| SEQ ID NO: 1155 | VH-3 | EVQLVESGGGLVQPGGSLRLSCAASGFTFRSYAMSW |
| | | VRQAPGKGLEWVAHISNGGDYIYYADTVKGRFTISRD |
| | | NSKNTLYLQMNSLRAEDTAVYYCTRPSYYSDPWFFD |
| | | VWGQGTTVTVSS |
| SEQ ID NO: 1156 | VH-4 | QVQLVQSGSELKKPGASVKVSCKASGFTFRSYAMSW |
| | | VRQAPGQGLEWVAHISNGGDYIYYADTVKGRFVISR |
| | | DNSVNTLYLQISSLKAEDTAVYYCTRPSYYSDPWFFD |
| | | VWGQGTTVTVSS |
| SEQ ID NO: 1157 | VH-5 | QVQLVQSGAEVKKPGASVKVSCKASGFTFRSYAMSW |
| | | VRQAPGQRLEWVAHISNGGDYIYYADTVKGRFTITRD |
| | | NSANTLYMELSSLRSEDTAVYYCTRPSYYSDPWFFDV |
| | | WGQGTTVTVSS |

VL for IMMU222 (humanized)) also referred to as Antibody I-H
Binds to human TCRVβ 6-5, 6-6, 6-9

| | | |
|---|---|---|
| SEQ ID NO: 1158 | VL-1 | ENVLTQSPATLSLSPGERATLSCSAGSSVSFMHWYQQ |
| | | KPGQAPKLLIYDTSKLASGIPARFSGSGSGNDFTLTISS |
| | | LEPEDFAVYYCLQGSGFPLTFGQGTKLEIK |
| SEQ ID NO: 1159 | VL-2 | ENVLTQSPDFQSVTPKEKVTITCSAGSSVSFMHWYQQ |
| | | KPDQSPKLLIYDTSKLASGVPSRFSGSGSGNDFTLTINS |
| | | LEAEDAATYYCLQGSGFPLTFGQGTKLEIK |
| SEQ ID NO: 1160 | VL-3 | DNQLTQSPSSLSASVGDRVTITCSAGSSVSFMHWYQQ |
| | | KPGKVPKLLIYDTSKLASGVPSRFSGSGSGNDFTLTISS |
| | | LQPEDVATYYCLQGSGFPLTFGQGTKLEIK |
| SEQ ID NO: 1161 | VL-4 | ANQLTQSPSSLSASVGDRVTITCSAGSSVSFMHWYQQ |
| | | KPGKAPKLLIYDTSKLASGVPSRFSGSGSGNDFTLTISS |
| | | LQPEDFATYYCLQGSGFPLTFGQGTKLEIK |
| SEQ ID NO: 1162 | VL-5 | DNVLTQSPDSLAVSLGERATINCSAGSSVSFMHWYQQ |
| | | KPGQPPKLLIYDTSKLASGVPDRFSGSGSGNDFTLTISS |
| | | LQAEDVAVYYCLQGSGFPLTFGQGTKLEIK |

REA1062 (murine), also referred to as BJ1189 or as Antibody J
Binds to human TCRVβ 5-1

| | | |
|---|---|---|
| SEQ ID NO: 1163 | HC CDR1 (Kabat) | DYNIH |
| SEQ ID NO: 1164 | HC CDR2 (Kabat) | YINPYNGRTGYNQKFKA |
| SEQ ID NO: 1165 | HC CDR3 (Kabat) | WDGSSYFDY |
| SEQ ID NO: 1166 | HC CDR1 (Chothia) | GYTFTDYNIH |
| SEQ ID NO: 1167 | HC CDR2 (Chothia) | NPYNGR |
| SEQ ID NO: 1165 | HC CDR3 (Chothia) | WDGSSYFDY |
| SEQ ID NO: 1166 | HC CDR1 (Combined) | GYTFTDYNIH |
| SEQ ID NO: 1164 | HC CDR2 (Combined) | YINPYNGRTGYNQKFKA |
| SEQ ID NO: 1165 | HC CDR3 (Combined) | WDGSSYFDY |
| SEQ ID NO: 1168 | LC CDR1 (Kabat) | SASSSVSYMH |
| SEQ ID NO: 1169 | LC CDR2 (Kabat) | EISKLAS |
| SEQ ID NO: 1170 | LC CDR3 (Kabat) | QQWNYPLLT |
| SEQ ID NO: 1297 | LC CDR1 (Chothia) | SSSVSY |
| SEQ ID NO: 1169 | LC CDR2 (Chothia) | EISKLAS |
| SEQ ID NO: 1170 | LC CDR3 (Chothia) | QQWNYPLLT |
| SEQ ID NO: 1168 | LC CDR1 (Combined) | SASSSVSYMH |
| SEQ ID NO: 1169 | LC CDR2 (Combined) | EISKLAS |
| SEQ ID NO: 1170 | LC CDR3 (Combined) | QQWNYPLLT |
| SEQ ID NO: 1171 | VL | EIVLTQSPAITAASLGQKVTITCSASSSVSYMHWYQQK |
| | | SGTSPKPWIYEISKLASGVPARFSGSGSGTSYSLTISS |
| | | MEAEDAAIYYCQQWNYPLLTFGAGTKLELK |
| SEQ ID NO: 1172 | VH | EVQLQQSGPVLVKPGASVRMSCKASGYTFTDYNIHW |
| | | VKQSHGRSLEWVGYINPYNGRTGYNQKFKAKATLTV |
| | | DKSSSTAYMDLRSLTSEDSAVYYCARWDGSSYFDYW |
| | | GQGTTLTVSS |

VH for REA1062 (humanized) also referred to as Antibody J-H
Binds to human TCRVβ 5-1

| | | |
|---|---|---|
| SEQ ID NO: 1173 | VH-1 | QVQLVQSGAEVKKPGSSVKVSCKASGYTFTDYNIHW |
| | | VRQAPGQGLEWVGYINPYNGRTGYNQKFKARATLTV |
| | | DKSTSTAYMELSSLRSEDTAVYYCARWDGSSYFDYW |
| | | GQGTTVTVSS |
| SEQ ID NO: 1174 | VH-2 | QVQLVQSGAEVKKPGASVKVSCKASGYTFTDYNIHW |
| | | VRQAPGQGLEWVGYINPYNGRTGYNQKFKARATLTV |
| | | DKSTSTAYMELRSLRSDDMAVYYCARWDGSSYFDY |
| | | WGQGTTVTVSS |
| SEQ ID NO: 1175 | VH-3 | QVQLVQSGAEVKKPGASVKVSCKASGYTFTDYNIHW |
| | | VRQATGQGLEWVGYINPYNGRTGYNQKFKARATLTV |
| | | NKSISTAYMELSSLRSEDTAVYYCARWDGSSYFDYW |
| | | GQGTTVTVSS |
| SEQ ID NO: 1176 | VH-4 | EVQLVESGGGLVQPGRSLRLSCTASGYTFTDYNIHWV |
| | | RQAPGKGLEWVGYINPYNGRTGYNQKFKARATLSVD |
| | | KSKSIAYLQMNSLKTEDTAVYYCARWDGSSYFDYWG |
| | | QGTTVTVSS |
| SEQ ID NO: 1177 | VH-5 | QVQLVQSGSELKKPGASVKVSCKASGYTFTDYNIHW |
| | | VRQAPGQGLEWVGYINPYNGRTGYNQKFKARAVLSV |
| | | DKSVSTAYLQISSLKAEDTAVYYCARWDGSSYFDYW |
| | | GQGTTVTVSS |

VL for REA1062 (humanized) also referred to as Antibody J-H
Binds to human TCRVβ 5-1

| | | |
|---|---|---|
| SEQ ID NO: 1178 | VL-1 | EIVLTQSPATLSLSPGERATLSCSASSSVSYMHWYQQK |
| | | PGQAPKLLIYEISKLASGIPARFSGSGSGTDYTLTISSLE |
| | | PEDFAVYYCQQWNYPLLTFGQGTKLEIK |
| SEQ ID NO: 1179 | VL-2 | EIVLTQSPATLSLSPGERATLSCSASSSVSYMHWYQQK |
| | | PGQAPKLLIYEISKLASGIPARFSGSGSGTDYTLTISRLE |
| | | PEDFAVYYCQQWNYPLLTFGQGTKLEIK |
| SEQ ID NO: 1180 | VL-3 | EIVLTQSPDFQSVTPKEKVTITCSASSSVSYMHWYQQK |
| | | PDQSPKLLIYEISKLASGVPSRFSGSGSGTDYTLTINSLE |
| | | AEDAATYYCQQWNYPLLTFGQGTKLEIK |
| SEQ ID NO: 1181 | VL-4 | DIQLTQSPSFLSASVGDRVTITCSASSSVSYMHWYQQK |
| | | PGKAPKLLIYEISKLASGVPSRFSGSGSGTEYTLTISSLQ |
| | | PEDFATYYCQQWNYPLLTFGQGTKLEIK |
| SEQ ID NO: 1182 | VL-5 | AIQLTQSPSSLSASVGDRVTITCSASSSVSYMHWYQQK |
| | | PGKAPKLLIYEISKLASGVPSRFSGSGSGTDYTLTISSL |
| | | QPEDFATYYCQQWNYPLLTFGQGTKLEIK |
| SEQ ID NO: 1183 | VL-6 | AIRLTQSPFSLSASVGDRVTITCSASSSVSYMHWYQQK |
| | | PAKAPKLFIYEISKLASGVPSRFSGSGSGTDYTLTISSL |
| | | QPEDFATYYCQQWNYPLLTFGQGTKLEIK |
| SEQ ID NO: 1184 | VL-7 | DIVLTQSPDSLAVSLGERATINCSASSSVSYMHWYQQ |
| | | KPGQPPKLLIYEISKLASGVPDRFSGSGSGTDYTLTI |
| | | SSLQAEDVAVYYCQQWNYPLLTFGQGTKLEIK |

JOVI-3 (murine), also referred to as BJ1187 or Antibody K
Binds to human TCRVβ 28

| | | |
|---|---|---|
| SEQ ID NO: 1185 | HC CDR1 (Kabat) | GSWMN |
| SEQ ID NO: 1186 | HC CDR2 (Kabat) | RIYPGDGDTDYSGKFKG |
| SEQ ID NO: 1187 | HC CDR3 (Kabat) | SGYFNYVPVFDY |
| SEQ ID NO: 1188 | HC CDR1 (Chothia) | GYTFSGS |
| SEQ ID NO: 1189 | HC CDR2 (Chothia) | YPGDGD |
| SEQ ID NO: 1187 | HC CDR3 (Chothia) | SGYFNYVPVFDY |
| SEQ ID NO: 1190 | HC CDR1 (Combined) | GYTFSGSWMN |
| SEQ ID NO: 1186 | HC CDR2 (Combined) | RIYPGDGDTDYSGKFKG |
| SEQ ID NO: 1187 | HC CDR3 (Combined) | SGYFNYVPVFDY |
| SEQ ID NO: 1191 | LC CDR1 (Kabat) | SANSTVGYIH |
| SEQ ID NO: 1192 | LC CDR2 (Kabat) | TTSNLAS |
| SEQ ID NO: 1193 | LC CDR3 (Kabat) | HQWSFYPT |
| SEQ ID NO: 1194 | LC CDR1 (Chothia) | NSTVGY |
| SEQ ID NO: 1192 | LC CDR2 (Chothia) | TTSNLAS |
| SEQ ID NO: 1193 | LC CDR3 (Chothia) | HQWSFYPT |
| SEQ ID NO: 1191 | LC CDR1 (Combined) | SANSTVGYIH |
| SEQ ID NO: 1192 | LC CDR2 (Combined) | TTSNLAS |
| SEQ ID NO: 1193 | LC CDR3 (Combined) | HQWSFYPT |
| SEQ ID NO: 1195 | VL | QIVLTQSPAIMSASLGEEIALTCSANSTVGYIHWYQQK |
| | | SGTSPKLLIYTTSNLASGVPSRFSGSGSGTFYSLTISS |
| | | VEAEDAADYFCHQWSFYPTFGGGTKLEIK |
| SEQ ID NO: 1196 | VH | QIQLQQSGPEVVKPGASVQISCKASGYTFSGSWMNW |
| | | VKQRPGKGLEWIGRIYPGDGDTDYSGKFKGRATLTA |
| | | DKSSSTAYMRLSSLTSEDSAVYFCARSGYFNYVPVFD |
| | | YWGQGTTLSVSS |

VH for JOVI-3 (humanized) also referred to as Antibody K-H
Binds to human TCRVβ 28

| | | |
|---|---|---|
| SEQ ID NO: 1197 | VH-1 | QIQLVQSGAEVKKPGASVKVSCKASGYTFSGSWMNW |
| | | VRQAPGQGLEWIGRIYPGDGDTDYSGKFKGRATLTA |
| | | DKSTSTAYMELSSLRSEDTAVYYCARSGYFNYVPVFD |
| | | YWGQGTTVTVSS |
| SEQ ID NO: 1198 | VH-2 | QIQLVQSGAEVKKPGSSVKVSCKASGYTFSGSWMNW |
| | | VRQAPGQGLEWIGRIYPGDGDTDYSGKFKGRATLTA |
| | | DKSTSTAYMELSSLRSEDTAVYYCARSGYFNYVPVFD |
| | | YWGQGTTVTVSS |
| SEQ ID NO: 1199 | VH-3 | EIQLVQSGAEVKKPGESLKISCKASGYTFSGSWMNWV |
| | | RQMPGKGLEWIGRIYPGDGDTDYSGKFKGQATLSAD |
| | | KSISTAYLQWSSLKASDTAMYYCARSGYFNYVPVFD |
| | | YWGQGTTVTVSS |
| SEQ ID NO: 1200 | VH-4 | QIQLVQSGSELKKPGASVKVSCKASGYTFSGSWMNW |
| | | VRQAPGQGLEWIGRIYPGDGDTDYSGKFKGRAVLSA |
| | | DKSVSTAYLQISSLKAEDTAVYYCARSGYFNYVPVFD |
| | | YWGQGTTVTVSS |
| SEQ ID NO: 1201 | VH-5 | QIQLVQSGSELKKPGASVKVSCKASGYTFSGSWMNW |
| | | VRQAPGQGLEWIGRIYPGDGDTDYSGKFKGRAVLSA |
| | | DKSVSMAYLQISSLKAEDTAVYYCARSGYFNYVPVF |
| | | DYWGQGTTVTVSS |
| SEQ ID NO: 1202 | VH-6 | EIQLVESGGGLVQPGRSLRLSCTASGYTFSGSWMNWV |
| | | RQAPGKGLEWIGRIYPGDGDTDYSGKFKGRATLSAD |
| | | KSKSIAYLQMNSLKTEDTAVYYCARSGYFNYVPVFD |
| | | YWGQGTTVTVSS |

VL for JOVI-3 (humanized) also referred to as Antibody K-H
Binds to human TCRVβ 28

| | | |
|---|---|---|
| SEQ ID NO: 1203 | VL-1 | EIVLTQSPATLSLSPGERATLSCSANSTVGYIHWYQQK |
| | | PGQAPKLLIYTTSNLASGIPARFSGSGSGTDYTLTISSL |
| | | EPEDFAVYFCHQWSFYPTFGQGTKLEIK |
| SEQ ID NO: 1204 | VL-2 | DIQLTQSPSFLSASVGDRVTITCSANSTVGYIHWYQQK |
| | | PGKAPKLLIYTTSNLASGVPSRFSGSGSGTEYTLTISSL |
| | | QPEDFATYFCHQWSFYPTFGQGTKLEIK |
| SEQ ID NO: 1205 | VL-3 | EIVLTQSPATLSLSPGERATLSCSANSTVGYIHWYQQK |
| | | PGQAPKLLIYTTSNLASGIPARFSGSGPGTDYTLTISSL |
| | | EPEDFAVYFCHQWSFYPTFGQGTKLEIK |
| SEQ ID NO: 1206 | VL-4 | DIVLTQSPDSLAVSLGERATINCSANSTVGYIHWYQQ |
| | | KPGQPPKLLIYTTSNLASGVPDRFSGSGSGTDYTLTISS |
| | | LQAEDVAVYFCHQWSFYPTFGQGTKLEIK |
| SEQ ID NO: 1207 | VL-5 | EIVLTQSPDFQSVTPKEKVTITCSANSTVGYIHWYQQK |
| | | PDQSPKLLIYTTSNLASGVPSRFSGSGSGTDYTLTINSL |
| | | EAEDAATYFCHQWSFYPTFGQGTKLEIK |

ZOE (murine), also referred to as BJ1538 or as Antibody L
Binds to human TCRVβ 4-1, 4-2, 4-3

| | | |
|---|---|---|
| SEQ ID NO: 1208 | HC CDR1 (Kabat) | DYYMY |
| SEQ ID NO: 1209 | HC CDR2 (Kabat) | TISGGGSYTYSPDSVKG |
| SEQ ID NO: 1210 | HC CDR3 (Kabat) | ERDIYYGNFNAMVY |
| SEQ ID NO: 1211 | HC CDR1 (Chothia) | GFTFSDY |
| SEQ ID NO: 1212 | HC CDR2 (Chothia) | SGGGSY |
| SEQ ID NO: 1210 | HC CDR3 (Chothia) | ERDIYYGNFNAMVY |
| SEQ ID NO: 1213 | HC CDR1 (Combined) | GFTFSDYYMY |
| SEQ ID NO: 1209 | HC CDR2 (Combined) | TISGGGSYTYSPDSVKG |
| SEQ ID NO: 1210 | HC CDR3 (Combined) | ERDIYYGNFNAMVY |
| SEQ ID NO: 1214 | LC CDR1 (Kabat) | RASKSVSTSGYSYMH |
| SEQ ID NO: 1215 | LC CDR2 (Kabat) | LASNLES |
| SEQ ID NO: 1216 | LC CDR3 (Kabat) | QHSRDLPWT |
| SEQ ID NO: 1217 | LC CDR1 (Chothia) | SKSVSTSGYSY |
| SEQ ID NO: 1215 | LC CDR2 (Chothia) | LASNLES |
| SEQ ID NO: 1216 | LC CDR3 (Chothia) | QHSRDLPWT |
| SEQ ID NO: 1214 | LC CDR1 (Combined) | RASKSVSTSGYSYMH |
| SEQ ID NO: 1215 | LC CDR2 (Combined) | LASNLES |
| SEQ ID NO: 1216 | LC CDR3 (Combined) | QHSRDLPWT |
| SEQ ID NO: 1218 | VL | DIVLTQSPVSLTVSLGQRATISCRASKSVSTSGYSYMH |
| | | WYQQKPGQPPKLLIYLASNLESGVPARFSGSGSGTDF |
| | | TLNIHPVEEEDAATYYCQHSRDLPWTFGGGTKLEIK |
| SEQ ID NO: 1219 | VH | EVQLVESGGGLVKPGGSLKLSCAASGFTFSDYYMYWV |
| | | RQTPEKRLEWVATISGGGSYTYSPDSVKGRFTISRDN |
| | | AKNNLYLQMSSLRSEDTAMYFCARERDIYYGNFNAM |
| | | VYWGRGTSVTVSS |

VH for ZOE (humanized) also referred to as Antibody L-H
Binds to human TCRVβ 4-1, 4-2, 4-3

| | | |
|---|---|---|
| SEQ ID NO: 1220 | VH-1 | EVQLLESGGGLVQPGGSLRLSCAASGFTFSDYYMYW |
| | | VRQAPGKGLEWVATISGGGSYTYSPDSVKGRFTISRD |
| | | NSKNTLYLQMNSLRAEDTAVYYCARERDIYYGNFNA |
| | | MVYWGRGTLVTVSS |
| SEQ ID NO: 1221 | VH-2 | EVQLVESGGGLVQPGGSLRLSCAASGFTFSDYYMYW |
| | | VRQAPGKGLEWVATISGGGSYTYSPDSVKGRFTISRD |
| | | NAKNSLYLQMNSLRAEDTAVYYCARERDIYYGNFNA |
| | | MVYWGRGTLVTVSS |
| SEQ ID NO: 1222 | VH-3 | QVQLVESGGGVVQPGRSLRLSCAASGFTFSDYYMY |
| | | WVRQAPGKGLEWVATISGGGSYTYSPDSVKGRFTIS |
| | | RDNSKNTLYLQMNSLRAEDTAVYYCARERDIYYGN |
| | | FNAMVYWGRGTLVTVSS |
| SEQ ID NO: 1223 | VH-4 | QVQLVESGGGLVKPGGSLRLSCAASGFTFSDYYMYWI |
| | | RQAPGKGLEWVATISGGGSYTYSPDSVKGRFTISRDN |
| | | AKNSLYLQMNSLRAEDTAVYYCARERDIYYGNFNAM |
| | | VYWGRGTLVTVSS |

VL for ZOE (humanized) also referred to as Antibody L-H
Binds to human TCRVβ 4-1, 4-2, 4-3

| | | |
|---|---|---|
| SEQ ID NO: 1224 | VL-1 | EIVLTQSPGTLSLSPGERATLSCRASKSVSTSGYSYMH |
| | | WYQQKPGQAPRLLIYLASNLESGIPDRFSGSGSGTDFT |
| | | LTISRLEPEDFAVYYCQHSRDLPWTFGGGTKVEIK |
| SEQ ID NO: 1225 | VL-2 | EIVLTQSPATLSLSPGERATLSCRASKSVSTSGYSYMH |
| | | WYQQKPGQAPRLLIYLASNLESGIPARFSGSGSGTDFT |
| | | LTISSLEPEDFAVYYCQHSRDLPWTFGGGTKVEIK |
| SEQ ID NO: 1226 | VL-3 | DIQLTQSPSTLSASVGDRVTITCRASKSVSTSGYSYMH |
| | | WYQQKPGKAPKLLIYLASNLESGVPSRFSGSGSGTEFT |
| | | LTISSLQPDDFATYYCQHSRDLPWTFGGGTKVEIK |
| SEQ ID NO: 1227 | VL-4 | AIQLTQSPSSLSASVGDRVTITCRASKSVSTSGYSYMH |
| | | WYQQKPGKAPKLLIYLASNLESGVPSRFSGSGSGTDF |
| | | TLTISSLQPEDFATYYCQHSRDLPWTFGGGTKVEIK |

Anti-TCRvbl9 (murine), also referred to as BJ1465; or Antibody M
Binds to human TCRVβ 19

| | | |
|---|---|---|
| SEQ ID NO: 1229 | HC CDR1 (Kabat) | GYFWN |
| SEQ ID NO: 1230 | HC CDR2 (Kabat) | YISYDGSNNYNPSLKN |
| SEQ ID NO: 1231 | HC CDR3 (Kabat) | PSPGTGYAVDY |
| SEQ ID NO: 1232 | HC CDR1 (Chothia) | GYSITSGY |
| SEQ ID NO: 1233 | HC CDR2 (Chothia) | SYDGSN |
| SEQ ID NO: 1231 | HC CDR3 (Chothia) | PSPGTGYAVDY |
| SEQ ID NO: 1234 | HC CDR1 (Combined) | GYSITSGYFWN |
| SEQ ID NO: 1230 | HC CDR2 (Combined) | YISYDGSNNYNPSLKN |
| SEQ ID NO: 1231 | HC CDR3 (Combined) | PSPGTGYAVDY |
| SEQ ID NO: 1235 | LC CDR1 (Kabat) | RSSQSLVHSNGNTYLH |
| SEQ ID NO: 1236 | LC CDR2 (Kabat) | KVSNRFS |
| SEQ ID NO: 1237 | LC CDR3 (Kabat) | SQSTHVPFT |
| SEQ ID NO: 1238 | LC CDR1 (Chothia) | SQSLVHSNGNTY |
| SEQ ID NO: 1236 | LC CDR2 (Chothia) | KVSNRFS |
| SEQ ID NO: 1237 | LC CDR3 (Chothia) | SQSTHVPFT |
| SEQ ID NO: 1235 | LC CDR1 (Combined) | RSSQSLVHSNGNTYLH |
| SEQ ID NO: 1236 | LC CDR2 (Combined) | KVSNRFS |
| SEQ ID NO: 1237 | LC CDR3 (Combined) | SQSTHVPFT |
| SEQ ID NO: 1239 | VL | NVVMTQTPLSLPVSLGDQASISCRSSQSLVHSNGNTYL |
| | | HWYLQKPGQSPKFLIYKVSNRFSGVPDRFSGGGSGTE |
| | | FTLKISRVEAEDLGVYFCSQSTHVPFTFGSGTKLEIK |
| SEQ ID NO: 1240 | VH | NVQLQESGPGLVKPSQSLSLTCSVAGYSITSGYFWNW |
| | | IRQFPGNKLEWMGYISYDGSNNYNPSLKNRISITRDTS |
| | | KNQFFLKLNSVTTEDTATYYCASPSPGTGYAVDYWG |
| | | QGTSVTVSS |

VH for Anti-TCRvb19 (humanized) also referred to as Antibody M-H
Binds to human TCRVβ 19

| | | |
|---|---|---|
| SEQ ID NO: 1241 | VH-1 | QVQLQESGPGLVKPSETLSLTCTVSGYSITSGYFWNWI |
| | | RQPPGKGLEWIGYISYDGSNNYNPSLKNRVTISRDTSK |
| | | NQFSLKLSSVTAADTAVYYCASPSPGTGYAVDYWGQ |
| | | GTLVTVSS |
| SEQ ID NO: 1242 | VH-2 | QVQLQESGPGLVKPSETLSLTCTVSGYSITSGYFWNWI |
| | | RQPPGKGLEWIGYISYDGSNNYNPSLKNRVTISRDTSK |
| | | NQFSLKLSSVTAADTAVYYCASPSPGTGYAVDYWGQ |
| | | GTLVTVSS |
| SEQ ID NO: 1243 | VH-3 | QVQLVESGGGLVQPGGSLRLSCSVSGYSITSGYFWNW |
| | | VRQAPGKGLEWVGYISYDGSNNYNPSLKNRFTISRDT |
| | | SKNTFYLQMNSLRAEDTAVYYCASPSPGTGYAVDYW |
| | | GQGTLVTVSS |

VL for Anti-TCRvb19 (humanized) also referred to as Antibody M-H
Binds to human TCRVβ 19

| | | |
|---|---|---|
| SEQ ID NO: 1244 | VL-1 | VVMTQSPGTLSLSPGERATLSCRSSQSLVHSNGNTYL |
| | | HWYQQKPGQAPRFLIYKVSNRFSGIPDRFSGSGSGTDF |
| | | TLTISRLEPEDFAVYFCSQSTHVPFTFGQGTKLEIK |
| SEQ ID NO: 1245 | VL-2 | EVVMTQSPATLSLSPGERATLSCRSSQSLVHSNGNTYL |
| | | HWYQQKPGQAPRFLIYKVSNRFSGIPARFSGSGSGTDF |
| | | TLTISSLEPEDFAVYFCSQSTHVPFTFGQGTKLEIK |
| SEQ ID NO: 1246 | VL-3 | EVVMTQSPATLSVSPGERATLSCRSSQSLVHSNGNTY |
| | | LHWYQQKPGQAPRFLIYKVSNRFSGIPARFSGSGSGTE |
| | | FTLTISSLQSEDFAVYFCSQSTHVPFTFGQGTKLEIK |
| SEQ ID NO: 1247 | VL-4 | DVQMTQSPSSLSASVGDRVTITCRSSQSLVHSNGNTY |
| | | LHWYQQKPGKAPKFLIYKVSNRFSGVPSRFSGSGSGT |
| | | DFTFTISSLQPEDIATYFCSQSTHVPFTFGQGTKLEIK |

BL37.2 (murine), also referred to as BJ1539 or Antibody N
Binds to human TCRVβ 9

| | | |
|---|---|---|
| SEQ ID NO: 1248 | HC CDR1 (Kabat) | DYIVH |
| SEQ ID NO: 1249 | HC CDR2 (Kabat) | WINTYTGTPTYADDFEG |
| SEQ ID NO: 1250 | HC CDR3 (Kabat) | SWRRGIRGIGFDY |
| SEQ ID NO: 1251 | HC CDR1 (Chothia) | GYTFTDY |
| SEQ ID NO: 1252 | HC CDR2 (Chothia) | ntytgt |
| SEQ ID NO: 1250 | HC CDR3 (Chothia) | SWRRGIRGIGFDY |
| SEQ ID NO: 1253 | HC CDR1 (Combined) | GYTFTDYIVH |
| SEQ ID NO: 1249 | HC CDR2 (Combined) | WINTYTGTPTYADDFEG |
| SEQ ID NO: 1250 | HC CDR3 (Combined) | SWRRGIRGIGFDY |
| SEQ ID NO: 1254 | LC CDR1 (Kabat) | KASKSINKYLA |
| SEQ ID NO: 1255 | LC CDR2 (Kabat) | DGSTLQS |
| SEQ ID NO: 1256 | LC CDR3 (Kabat) | QQHNEYPPT |
| SEQ ID NO: 1257 | LC CDR1 (Chothia) | SKSINKY |
| SEQ ID NO: 1255 | LC CDR2 (Chothia) | DGSTLQS |
| SEQ ID NO: 1256 | LC CDR3 (Chothia) | QQHNEYPPT |
| SEQ ID NO: 1254 | LC CDR1 (Combined) | KASKSINKYLA |
| SEQ ID NO: 1255 | LC CDR2 (Combined) | DGSTLQS |
| SEQ ID NO: 1256 | LC CDR3 (Combined) | QQHNEYPPT |
| SEQ ID NO: 1258 | VL | DVQMTQSPYNLAASPGESVSINCKASKSINKYLAWYQ |
| | | QKPGKPNKLLIYDGSTLQSGIPSRFSGSGSGTDFTLT |
| | | IRGLEPEDFGLYYCQQHNEYPPTFGAGTKLELK |
| SEQ ID NO: 1259 | VH | QLQLVQSGPELREPGESVKISCKASGYTFTDYIVHWV |
| | | KQAPGKGLKWMGWINTYTGTPTYADDFEGRFVFSLE |
| | | ASASTANLQISNLKNEDTATYFCARSWRRGIRGIGFD |
| | | YWGQGVMVTVSS |

VH for BL37.2 (humanized) also referred to as Antibody N-H
Binds to human TCRVβ 9

| | | |
|---|---|---|
| SEQ ID NO: 1260 | VH-1 | QLQLVQSGAEVKKPGASVKVSCKASGYTFTDYIVHW |
| | | VRQAPGQGLEWMGWINTYTGTPTYADDFEGWVTMTL |
| | | DASISTAYMELSRLRSDDTAVYYCARSWRRGIRGIG |
| | | FDYWGQGTMVTVSS |
| SEQ ID NO: 1261 | VH-2 | QLQLVQSGAEVKKPGASVKVSCKASGYTFTDYIVHW |
| | | VRQAPGQGLEWMGWINTYTGTPTYADDFEGRVTMTL |
| | | DASTSTAYMELSSLRSEDTAVYYCARSWRRGIRGIG |
| | | FDYWGQGTMVTVSS |
| SEQ ID NO: 1262 | VH-3 | QLQLVQSGAEVKKPGASVKVSCKASGYTFTDYIVHW |
| | | VRQAPGQRLEWMGWINTYTGTPTYADDFEGRVTITL |
| | | DASASTAYMELSSLRSEDMAVYYCARSWRRGIRGIG |
| | | FDYWGQGTMVTVSS |
| SEQ ID NO: 1263 | VH-4 | QLQLVQSGAEVKKPGASVKVSCKASGYTFTDYIVHW |
| | | VRQATGQGLEWMGWINTYTGTPTYADDFEGRVTMTL |
| | | NASISTAYMELSSLRSEDTAVYYCARSWRRGIRGIG |
| | | FDYWGQGTMVTVSS |

VL for BL37.2 (humanized) also referred to as Antibody N-H
Binds to human TCRVβ 9

| | | |
|---|---|---|
| SEQ ID NO: 1264 | VL-1 | EVVMTQSPGTLSLSPGERATLSCKASKSINKYLAWYQ |
| | | QKPGQAPRLLIYDGSTLQSGIPDRFSGSGSGTDFTLTIS |
| | | RLEPEDFAVYYCQQHNEYPPTFGQGTKLEIK |
| SEQ ID NO: 1265 | VL-2 | EVVMTQSPATLSLSPGERATLSCKASKSINKYLAWYQ |
| | | QKPGQAPRLLIYDGSTLQSGIPARFSGSGSGTDFTLTIS |
| | | SLEPEDFAVYYCQQHNEYPPTFGQGTKLEIK |
| SEQ ID NO: 1266 | VL-3 | DVQMTQSPSSLSASVGDRVTITCKASKSINKYLAWYQ |
| | | QKPGKAPKLLIYDGSTLQSGVPSRFSGSGSGTDFTLTIS |
| | | SLQPEDFATYYCQQHNEYPPTFGQGTKLEIK |
| SEQ ID NO: 1267 | VL-4 | AVRMTQSPSSFSASTGDRVTITCKASKSINKYLAWYQ |
| | | QKPGKAPKLLIYDGSTLQSGVPSRFSGSGSGTDFTLTIS |
| | | CLQSEDFATYYCQQHNEYPPTFGQGTKLEIK |

IG125 (murine) binds to TRVβ 11-2; also referred to as Antibody O

| | | |
|---|---|---|
| SEQ ID NO: 1268 | HC CDR1 (Kabat) | NYGVH |
| SEQ ID NO: 1269 | HC CDR2 (Kabat) | VIWSDGSTDYDTAFIS |
| SEQ ID NO: 1270 | HC CDR3 (Kabat) | RAVVADFDY |
| SEQ ID NO: 1271 | HC CDR1 (Chothia) | GFSLTN |
| SEQ ID NO: 1272 | HC CDR2 (Chothia) | VIWSDGSTD |
| SEQ ID NO: 1270 | HC CDR3 (Chothia) | RAVVADFDY |
| SEQ ID NO: 1273 | HC CDR1 (combined) | GFSLTNYGVH |
| SEQ ID NO: 1269 | HC CDR2 (combined) | VIWSDGSTDYDTAFIS |
| SEQ ID NO: 1270 | HC CDR3 (combined) | RAVVADFDY |
| SEQ ID NO: 1274 | VH | QVQLKQSGPGLLQPSQSLSITCTVSGFSLTNYGVHWV |
| | | RQSPGKGLEWLGVIWSDGSTDYDTAFISRLSISKDNSK |
| | | SQVFFKLNSLQADDTAIYYCARRAVVADFDYWGQGT |
| | | TLTVSS |
| SEQ ID NO: 1275 | LC CDR1 (Kabat) | KASKEVTIFGSISALH |
| SEQ ID NO: 1276 | LC CDR2 (Kabat) | NGAKLES |
| SEQ ID NO: 1277 | LC CDR3 (Kabat) | LQNKEVPFT |
| SEQ ID NO: 1275 | LC CDR1 (Chothia) | KASKEVTIFGSISALH |
| SEQ ID NO: 1276 | LC CDR2 (Chothia) | NGAKLES |
| SEQ ID NO: 1277 | LC CDR3 (Chothia) | LQNKEVPFT |
| SEQ ID NO: 1275 | LC CDR1 (combined) | KASKEVTIFGSISALH |
| SEQ ID NO: 1276 | LC CDR2 (combined) | NGAKLES |
| SEQ ID NO: 1277 | LC CDR3 (combined) | LQNKEVPFT |
| SEQ ID NO: 1278 | VL | DIVLTQSPASLAVSLGQKATISCKASKEVTIFGSISA |
| | | LHWYQQKPGQPPKLIYNGAKLESGVSARFSDSGSQNR |
| | | SPFGNQLSFTLTIAPVEADDAATYYCLQNKEVPFTFG |
| | | SGTKLEIK |

VL for IG125 (humanized) also referred to as Antibody O-H
binds to TRVβ 11-2

| | | |
|---|---|---|
| SEQ ID NO: 1279 | VL-1 | DIVLTQSPDSLAVSLGERATINCKASKEVTIFGSISALH |
| | | WYQQKPGQPPKLLYNGAKLESGVSARFGVPDRFSRS |
| | | GSGLDFTLTISSLQAEDVAVYYCLQNKEVPFTFGQGT |
| | | KLEIK |
| SEQ ID NO: 1280 | VL-2 | EIVLTQSPDFQSVTPKEKVTITCKASKEVTIFGSISALH |
| | | WYQQKPDQSPKLLYNGAKLESGVSARFGVPSRFSRS |
| | | GSGLDFTLTINSLEAEDAATYYCLQNKEVPFTFGQGT |
| | | KLEIK |
| SEQ ID NO: 1281 | VL-3 | AIQLTQSPSSLSASVGDRVTITCKASKEVTIFGSISALH |
| | | WYQQKPGKAPKLLYNGAKLESGVSARFGVPSRFSRS |
| | | GSGLDFTLTISSLQPEDFATYYCLQNKEVPFTFGQGT |
| | | KLEIK |
| SEQ ID NO: 1282 | VL-4 | DIVLTQTPLSLSVTPGQPASISCKASKEVTIFGSISALH |
| | | WYLQKPGQPPKLLYNGAKLESGVSARFGVPDRFSRS |
| | | GSGLDFTLKISRVEAEDVGVYYCLQNKEVPFTFGQG |
| | | TKLEIK |

VH for IG125 (humanized) also referred to as Antibody O-H
binds to TRVβ 11-2

| | | |
|---|---|---|
| SEQ ID NO: 1283 | VH-1 | QVTLKESGPVLVKPTETLTLTCTVSGFSLTNYGVHW |
| | | VRQPPGKALEWLGVIWSDGSTDYDTAFISRLTISKDN |
| | | SKSQVVLTMTNMDPVDTATYYCARRAVVADFDYW |
| | | GQGTTVTVSS |
| SEQ ID NO: 1284 | VH-2 | QVQLQESGPGLVKPSGTLSLTCAVSGFSLTNYGVHW |
| | | VRQPPGKGLEWLGVIWSDGSTDYDTAFISRLTISKDN |
| | | SKSQVSLKLSSVTAADTAVYYCARRAVVADFDYWG |
| | | QGTTVTVSS |
| SEQ ID NO: 1285 | VH-3 | QVQLQQSGPGLVKPSQTLSLTCAVSGFSLTNYGVHW |
| | | VRQSPSRGLEWLGVIWSDGSTDYDTAFISRLTINKDN |
| | | SKSQVSLQLNSVTPEDTAVYYCARRAVVADFDYWG |
| | | QGTTVTVSS |
| SEQ ID NO: 1286 | VH-4 | EVQLVESGGGLVQPGPSLRLSCTVSGFSLTNYGVHW |
| | | VRQAPGKGLEWLGVIWSDGSTDYDTAFISRLTISKDN |
| | | SKSIVYLQMNSLKTEDTAVYYCARRAVVADFDYWG |
| | | QGTTVTVSS |
| SEQ ID NO: 1287 | VH-5 | EVQLVQSGAEVKKPGESLRISCKVSGFSLTNYGVHW |
| | | VRQMPGKGLEWLGVIWSDGSTDYDTAFISQLTISKD |
| | | NSISTVYLQWSSLKASDTAMYYCARRAVVADFDYW |
| | | GQGTTVTVSS |

MR5-2 (murine), binds to human TCRVβ 13-2

| | | |
|---|---|---|
| SEQ ID NO: 1376 | SCFV (VH + VL) | QVQLQQSGTELMKPGASVKISCKASGYTFSNYWIEW |
| | | IKQRPGHGLEWVGEILPGAGPTNYNEKFKGKATFTA |
| | | DSSSNTAYMQLSSLTSEDSAVYYCARTDYDYDWFA |
| | | YWGQGTLVTVSAGGGGSGGGGSGGGGSGGGGSDIV |
| | | MSQSPSSLAVSVGEKVTMSCKSSQSLLYSGNQKNYL |
| | | AWYQQKPGQSPKLLIYWASTRESGVPDRFTGSGSGT |
| | | DFTLTINSVKAEDLTVYYCQQYYGYPRTFGGGTKVEI |
| | | K |

### Anti-TCRVβ Antibody Effector Function and Fc Variants

[0820] In some embodiments, an anti-TCRVβ antibody disclosed herein comprises an Fc region, e.g., as described herein. In some embodiments, the Fc region is a wildtype Fc region, e.g., a wildtype human Fc region. In some embodiments, the Fc region comprises a variant, e.g., an Fc region comprising an addition, substitution, or deletion of at least one amino acid residue in the Fc region which results in, e.g., reduced or ablated affinity for at least one Fc receptor.

[0821] The Fc region of an antibody interacts with a number of receptors or ligands including Fc Receptors (e.g., FcγRI, FcγRIIA, FcγRIIIA), the complement protein CIq, and other molecules such as proteins A and G. These interactions are essential for a variety of effector functions and downstream signaling events including: antibody dependent cell-mediated cytotoxicity (ADCC), Antibody-dependent cellular phagocytosis (ADCP) and complement dependent cytotoxicity (CDC).

[0822] In some embodiments, an anti-TCRVβ antibody comprising a variant Fc region has reduced, e.g., ablated, affinity for an Fc receptor, e.g., an Fc receptor described herein. In some embodiments, the reduced affinity is compared to an otherwise similar antibody with a wildtype Fc region.

[0823] In some embodiments, an anti-TCRVβ antibody comprising a variant Fc region has one or more of the following properties: (1) reduced effector function (e.g., reduced ADCC, ADCP and/or CDC); (2) reduced binding to one or more Fc receptors; and/or (3) reduced binding to Clq complement. In some embodiments, the reduction in any one, or all of properties (1)-(3) is compared to an otherwise similar antibody with a wildtype Fc region.

[0824] In some embodiments, an anti-TCRVβ antibody comprising a variant Fc region has reduced affinity to a human Fc receptor, e.g., FcγR I, FcγR II and/or FcγR III. In some embodiments, the anti-TCRVβ antibody comprising a variant Fc region comprises a human IgG1 region or a human IgG4 region.

[0825] In some embodiments, an anti-TCRVβ antibody comprising a variant Fc region activates and/or expands T cells, e.g., as described herein. In some embodiments, an anti-TCRVβ antibody comprising a variant Fc region has a cytokine profile described herein, e.g., a cytokine profile that differs from a cytokine profile of a T cell engager that binds to a receptor or molecule other than a TCRβV region (“a non-TCRβV-binding T cell engager”). In some embodiments, the non-TCRβV-binding T cell engager comprises an antibody that binds to a CD3 molecule (e.g., CD3 epsilon (CD3e) molecule); or a TCR alpha (TCRα) molecule.

[0826] Exemplary Fc region variants are provided in Table 21 and also disclosed in Saunders 0, (2019) Frontiers in Immunology; vol 10, article 1296, the entire contents of which is hereby incorporated by reference.

[0827] In some embodiments, an anti-TCRVβ antibody disclosed herein comprises any one or all, or any combination of Fc region variants disclosed in Table 21.

[0828] In some embodiments, an anti-TCRVβ antibody disclosed herein comprises any one or all, or any combination of Fc region variants, e.g., mutations, disclosed in Table 21. In some embodiments, an anti-TCRVβ antibody disclosed herein comprise an Asn297Ala (N297A) mutation. In some embodiments, an anti-TCRVβ antibody disclosed herein comprise a Leu234A1a/Leu235Ala (LALA) mutation.

TABLE 21
Exemplary Fc modifications

| | Altered effector |
|---|---|
| Modification or mutation | function |
| Leu235Glu | ADCC; |
| Leu234Ala/Leu235Ala (LALA) | ADCC; ADCP; CDC |
| Ser228Pro/Leu235Glu | |
| Leu234Ala/Leu235Ala/Pro329Gly | ADCP |
| Pro331Ser/Leu234Glu/Leu235Phe | CDC |
| Asp265Ala | ADCC, ADCP |
| Gly237Ala | ADCP |
| Glu318Ala | ADCP |
| Glu233Pro | |
| Gly236Arg/Leu328Arg | ADCC |
| His268Gln/Val309Leu/Ala330Ser/Pro331Ser | ADCC; ADCP; CDC |
| Val234Ala/Gly237Ala/Pro238Ser/ | ADCC; ADCP; CDC |
| His268Ala/Val309Leu/Ala330Ser/Pro331Ser | |
| Leu234Ala/L235Ala/Gly237Ala/P238Ser/ | ADCC; CDC |
| His268Ala/Ala330Ser/Pro331Ser | |
| Ala330Leu | CDC |
| Asp270Ala | CDC |
| Lys322Ala | CDC |
| Pro329Ala | CDC |
| Pro331Ala | CDC |
| Val264Ala | CDC |
| High mannose glycosylation | CDC |
| Phe241Ala | CDC |
| Asn297Ala or Gly or Gln | ADCC; ADCP; CDC |
| S228P/Phe234Ala/Leu235Ala | ADCC; CDC |

### Antibody Molecules

[0829] In one embodiment, the antibody molecule binds to a cancer antigen, e.g., a tumor antigen or a stromal antigen. In some embodiments, the cancer antigen is, e.g., a mammalian, e.g., a human, cancer antigen. In other embodiments, the antibody molecule binds to an immune cell antigen, e.g., a mammalian, e.g., a human, immune cell antigen. For example, the antibody molecule binds specifically to an epitope, e.g., linear or conformational epitope, on the cancer antigen or the immune cell antigen.

[0830] In an embodiment, an antibody molecule is a monospecific antibody molecule and binds a single epitope. E.g., a monospecific antibody molecule having a plurality of immunoglobulin variable domain sequences, each of which binds the same epitope.

[0831] In an embodiment an antibody molecule is a multispecific or multifunctional antibody molecule, e.g., it comprises a plurality of immunoglobulin variable domains sequences, wherein a first immunoglobulin variable domain sequence of the plurality has binding specificity for a first epitope and a second immunoglobulin variable domain sequence of the plurality has binding specificity for a second epitope. In an embodiment the first and second epitopes are on the same antigen, e.g., the same protein (or subunit of a multimeric protein). In an embodiment the first and second epitopes overlap. In an embodiment the first and second epitopes do not overlap. In an embodiment the first and second epitopes are on different antigens, e.g., the different proteins (or different subunits of a multimeric protein). In an embodiment a multispecific antibody molecule comprises a third, fourth or fifth immunoglobulin variable domain. In an embodiment, a multispecific antibody molecule is a bispecific antibody molecule, a trispecific antibody molecule, or a tetraspecific antibody molecule.

[0832] In an embodiment a multispecific antibody molecule is a bispecific antibody molecule. A bispecific antibody has specificity for no more than two antigens. A bispecific antibody molecule is characterized by a first immunoglobulin variable domain sequence which has binding specificity for a first epitope and a second immunoglobulin variable domain sequence that has binding specificity for a second epitope. In an embodiment the first and second epitopes are on the same antigen, e.g., the same protein (or subunit of a multimeric protein). In an embodiment the first and second epitopes overlap. In an embodiment the first and second epitopes do not overlap. In an embodiment the first and second epitopes are on different antigens, e.g., the different proteins (or different subunits of a multimeric protein). In an embodiment a bispecific antibody molecule comprises a heavy chain variable domain sequence and a light chain variable domain sequence which have binding specificity for a first epitope and a heavy chain variable domain sequence and a light chain variable domain sequence which have binding specificity for a second epitope. In an embodiment a bispecific antibody molecule comprises a half antibody having binding specificity for a first epitope and a half antibody having binding specificity for a second epitope. In an embodiment a bispecific antibody molecule comprises a half antibody, or fragment thereof, having binding specificity for a first epitope and a half antibody, or fragment thereof, having binding specificity for a second epitope. In an embodiment a bispecific antibody molecule comprises a scFv or a Fab, or fragment thereof, have binding specificity for a first epitope and a scFv or a Fab, or fragment thereof, have binding specificity for a second epitope.

[0833] In an embodiment, an antibody molecule comprises a diabody, and a single-chain molecule, as well as an antigen-binding fragment of an antibody (e.g., Fab, F(ab′)₂, and Fv). For example, an antibody molecule can include a heavy (H) chain variable domain sequence (abbreviated herein as VH), and a light (L) chain variable domain sequence (abbreviated herein as VL). In an embodiment an antibody molecule comprises or consists of a heavy chain and a light chain (referred to herein as a half antibody. In another example, an antibody molecule includes two heavy (H) chain variable domain sequences and two light (L) chain variable domain sequence, thereby forming two antigen binding sites, such as Fab, Fab′, F(ab′)₂, Fc, Fd, Fd′, Fv, single chain antibodies (scFv for example), single variable domain antibodies, diabodies (Dab) (bivalent and bispecific), and chimeric (e.g., humanized) antibodies, which may be produced by the modification of whole antibodies or those synthesized de novo using recombinant DNA technologies. These functional antibody fragments retain the ability to selectively bind with their respective antigen or receptor. Antibodies and antibody fragments can be from any class of antibodies including, but not limited to, IgG, IgA, IgM, IgD, and IgE, and from any subclass (e.g., IgG1, IgG2, IgG3, and IgG4) of antibodies. The preparation of antibody molecules can be monoclonal or polyclonal. An antibody molecule can also be a human, humanized, CDR-grafted, or in vitro generated antibody. The antibody can have a heavy chain constant region chosen from, e.g., IgG1, IgG2, IgG3, or IgG4. The antibody can also have a light chain chosen from, e.g., kappa or lambda. The term “immunoglobulin” (Ig) is used interchangeably with the term “antibody” herein.

[0834] Examples of antigen-binding fragments of an antibody molecule include: (i) a Fab fragment, a monovalent fragment consisting of the VL, VH, CL and CH1 domains; (ii) a F(ab′)2 fragment, a bivalent fragment comprising two Fab fragments linked by a disulfide bridge at the hinge region; (iii) a Fd fragment consisting of the VH and CH1 domains; (iv) a Fv fragment consisting of the VL and VH domains of a single arm of an antibody, (v) a diabody (dAb) fragment, which consists of a VH domain; (vi) a camelid or camelized variable domain; (vii) a single chain Fv (scFv), see e.g., Bird et al. (1988) Science 242:423-426; and Huston et al. (1988) Proc. Natl. Acad. Sci. USA 85:5879-5883); (viii) a single domain antibody. These antibody fragments are obtained using conventional techniques known to those with skill in the art, and the fragments are screened for utility in the same manner as are intact antibodies.

[0835] Antibody molecules include intact molecules as well as functional fragments thereof. Constant regions of the antibody molecules can be altered, e.g., mutated, to modify the properties of the antibody (e.g., to increase or decrease one or more of: Fc receptor binding, antibody glycosylation, the number of cysteine residues, effector cell function, or complement function).

[0836] Antibody molecules can also be single domain antibodies. Single domain antibodies can include antibodies whose complementary determining regions are part of a single domain polypeptide. Examples include, but are not limited to, heavy chain antibodies, antibodies naturally devoid of light chains, single domain antibodies derived from conventional 4-chain antibodies, engineered antibodies and single domain scaffolds other than those derived from antibodies. Single domain antibodies may be any of the art, or any future single domain antibodies. Single domain antibodies may be derived from any species including, but not limited to mouse, human, camel, llama, fish, shark, goat, rabbit, and bovine. According to another aspect of the invention, a single domain antibody is a naturally occurring single domain antibody known as heavy chain antibody devoid of light chains. Such single domain antibodies are disclosed in WO 9404678, for example. For clarity reasons, this variable domain derived from a heavy chain antibody naturally devoid of light chain is known herein as a VHH or nanobody to distinguish it from the conventional VH of four chain immunoglobulins. Such a VHH molecule can be derived from antibodies raised in Camelidae species, for example in camel, llama, dromedary, alpaca and guanaco. Other species besides Camelidae may produce heavy chain antibodies naturally devoid of light chain; such VHHs are within the scope of the invention.

[0837] The VH and VL regions can be subdivided into regions of hypervariability, termed “complementarity determining regions” (CDR), interspersed with regions that are more conserved, termed “framework regions” (FR or FW).

[0838] The extent of the framework region and CDRs has been precisely defined by a number of methods (see, Kabat, E. A., et al. (1991) Sequences of Proteins of Immunological Interest, Fifth Edition, U.S. Department of Health and Human Services, NIH Publication No. 91-3242; Chothia, C. et al. (1987) J. Mol. Biol. 196:901-917; and the AbM definition used by Oxford Molecular's AbM antibody modeling software. See, generally, e.g., Protein Sequence and Structure Analysis of Antibody Variable Domains. In: Antibody Engineering Lab Manual (Ed.: Duebel, S. and Kontermann, R., Springer-Verlag, Heidelberg).

[0839] The terms “complementarity determining region,” and “CDR,” as used herein refer to the sequences of amino acids within antibody variable regions which confer antigen specificity and binding affinity. In general, there are three CDRs in each heavy chain variable region (HCDR1, HCDR2, HCDR3) and three CDRs in each light chain variable region (LCDR1, LCDR2, LCDR3).

[0840] The precise amino acid sequence boundaries of a given CDR can be determined using any of a number of known schemes, including those described by Kabat et al. (1991), “Sequences of Proteins of Immunological Interest,” 5th Ed. Public Health Service, National Institutes of Health, Bethesda, Md. (“Kabat” numbering scheme), Al-Lazikani et al., (1997) JMB 273,927-948 (“Chothia” numbering scheme). As used herein, the CDRs defined according the “Chothia” number scheme are also sometimes referred to as “hypervariable loops.”

[0841] For example, under Kabat, the CDR amino acid residues in the heavy chain variable domain (VH) are numbered 31-35 (HCDR1), 50-65 (HCDR2), and 95-102 (HCDR3); and the CDR amino acid residues in the light chain variable domain (VL) are numbered 24-34 (LCDR1), 50-56 (LCDR2), and 89-97 (LCDR3). Under Chothia, the CDR amino acids in the VH are numbered 26-32 (HCDR1), 52-56 (HCDR2), and 95-102 (HCDR3); and the amino acid residues in VL are numbered 26-32 (LCDR1), 50-52 (LCDR2), and 91-96 (LCDR3).

[0842] Each VH and VL typically includes three CDRs and four FRs, arranged from amino-terminus to carboxy-terminus in the following order: FR1, CDR1, FR2, CDR2, FR3, CDR3, FR4.

[0843] The antibody molecule can be a polyclonal or a monoclonal antibody.

[0844] The terms “monoclonal antibody” or “monoclonal antibody composition” as used herein refer to a preparation of antibody molecules of single molecular composition. A monoclonal antibody composition displays a single binding specificity and affinity for a particular epitope. A monoclonal antibody can be made by hybridoma technology or by methods that do not use hybridoma technology (e.g., recombinant methods).

[0845] The antibody can be recombinantly produced, e.g., produced by phage display or by combinatorial methods, or by yeast display.

[0846] Phage display and combinatorial methods for generating antibodies are known in the art (as described in, e.g., Ladner et al. U.S. Pat. No. 5,223,409; Kang et al. International Publication No. WO 92/18619; Dower et al. International Publication No. WO 91/17271; Winter et al. International Publication WO 92/20791; Markland et al. International Publication No. WO 92/15679; Breitling et al. International Publication WO 93/01288; McCafferty et al. International Publication No. WO 92/01047; Garrard et al. International Publication No. WO 92/09690; Ladner et al. International Publication No. WO 90/02809; Fuchs et al. (1991) Bio/Technology 9:1370-1372; Hay et al. (1992) Hum Antibod Hybridomas 3:81-85; Huse et al. (1989) Science 246:1275-1281; Griffths et al. (1993) EMBO J 12:725-734; Hawkins et al. (1992) J Mol Biol 226:889-896; Clackson et al. (1991) Nature 352:624-628; Gram et al. (1992) PNAS 89:3576-3580; Garrad et al. (1991) Bio/Technology 9:1373-1377; Hoogenboom et al. (1991) Nuc Acid Res 19:4133-4137; and Barbas et al. (1991) PNAS 88:7978-7982, the contents of all of which are incorporated by reference herein).

[0847] The yeast display method for generating or identifying antibodies is known in the art, e.g., as described in Chao et al. (2006) Nature Protocols 1(2):755-68, the entire contents of which is incorporated by reference herein.

[0848] In one embodiment, the antibody is a fully human antibody (e.g., an antibody made in a mouse which has been genetically engineered to produce an antibody from a human immunoglobulin sequence), or a non-human antibody, e.g., a rodent (mouse or rat), goat, primate (e.g., monkey), camel antibody. Preferably, the non-human antibody is a rodent (mouse or rat antibody). Methods of producing rodent antibodies are known in the art.

[0849] Human monoclonal antibodies can be generated using transgenic mice carrying the human immunoglobulin genes rather than the mouse system. Splenocytes from these transgenic mice immunized with the antigen of interest are used to produce hybridomas that secrete human mAbs with specific affinities for epitopes from a human protein (see, e.g., Wood et al. International Application WO 91/00906, Kucherlapati et al. PCT publication WO 91/10741; Lonberg et al. International Application WO 92/03918; Kay et al. International Application 92/03917; Lonberg, N. et al. 1994 Nature 368:856-859; Green, L. L. et al. 1994 Nature Genet. 7:13-21; Morrison, S. L. et al. 1994 Proc. Natl. Acad. Sci. USA 81:6851-6855; Bruggeman et al. 1993 Year Immunol 7:33-40; Tuaillon et al. 1993 PNAS 90:3720-3724; Bruggeman et al. 1991 Eur J Immunol 21:1323-1326).

[0850] An antibody molecule can be one in which the variable region, or a portion thereof, e.g., the CDRs, are generated in a non-human organism, e.g., a rat or mouse. Chimeric, CDR-grafted, and humanized antibodies are within the invention. Antibody molecules generated in a non-human organism, e.g., a rat or mouse, and then modified, e.g., in the variable framework or constant region, to decrease antigenicity in a human are within the invention.

[0851] An “effectively human” protein is a protein that does substantially not evoke a neutralizing antibody response, e.g., the human anti-murine antibody (HAMA) response. HAMA can be problematic in a number of circumstances, e.g., if the antibody molecule is administered repeatedly, e.g., in treatment of a chronic or recurrent disease condition. A HAMA response can make repeated antibody administration potentially ineffective because of an increased antibody clearance from the serum (see, e.g., Saleh et al., Cancer Immunol. Immunother., 32:180-190 (1990)) and also because of potential allergic reactions (see, e.g., LoBuglio et al., Hybridoma, 5:5117-5123 (1986)).

[0852] Chimeric antibodies can be produced by recombinant DNA techniques known in the art (see Robinson et al., International Patent Publication PCT/US86/02269; Akira, et al., European Patent Application 184,187; Taniguchi, M., European Patent Application 171,496; Morrison et al., European Patent Application 173,494; Neuberger et al., International Application WO 86/01533; Cabilly et al. U.S. Pat. No. 4,816,567; Cabilly et al., European Patent Application 125,023; Better et al. (1988 Science 240:1041-1043); Liu et al. (1987) PNAS 84:3439-3443; Liu et al., 1987, J. Immunol. 139:3521-3526; Sun et al. (1987) PNAS 84:214-218; Nishimura et al., 1987, Canc. Res. 47:999-1005; Wood et al. (1985) Nature 314:446-449; and Shaw et al., 1988, J. Natl Cancer Inst. 80:1553-1559).

[0853] A humanized or CDR-grafted antibody will have at least one or two but generally all three recipient CDRs (of heavy and or light immuoglobulin chains) replaced with a donor CDR. The antibody may be replaced with at least a portion of a non-human CDR or only some of the CDRs may be replaced with non-human CDRs. It is only necessary to replace the number of CDRs required for binding to the antigen. Preferably, the donor will be a rodent antibody, e.g., a rat or mouse antibody, and the recipient will be a human framework or a human consensus framework. Typically, the immunoglobulin providing the CDRs is called the “donor” and the immunoglobulin providing the framework is called the “acceptor.” In one embodiment, the donor immunoglobulin is a non-human (e.g., rodent). The acceptor framework is a naturally-occurring (e.g., a human) framework or a consensus framework, or a sequence about 85% or higher, preferably 90%, 95%, 99% or higher identical thereto.

[0854] As used herein, the term “consensus sequence” refers to the sequence formed from the most frequently occurring amino acids (or nucleotides) in a family of related sequences (See e.g., Winnaker, From Genes to Clones (Verlagsgesellschaft, Weinheim, Germany 1987). In a family of proteins, each position in the consensus sequence is occupied by the amino acid occurring most frequently at that position in the family. If two amino acids occur equally frequently, either can be included in the consensus sequence. A “consensus framework” refers to the framework region in the consensus immunoglobulin sequence.

[0855] An antibody molecule can be humanized by methods known in the art (see e.g., Morrison, S. L., 1985, Science 229:1202-1207, by Oi et al., 1986, BioTechniques 4:214, and by Queen et al. U.S. Pat. Nos. 5,585,089, 5,693,761 and 5,693,762, the contents of all of which are hereby incorporated by reference).

[0856] Humanized or CDR-grafted antibody molecules can be produced by CDR-grafting or CDR substitution, wherein one, two, or all CDRs of an immunoglobulin chain can be replaced. See e.g., U.S. Pat. No. 5,225,539; Jones et al. 1986 Nature 321:552-525; Verhoeyan et al. 1988 Science 239:1534; Beidler et al. 1988 J. Immunol. 141:4053-4060; Winter U.S. Pat. No. 5,225,539, the contents of all of which are hereby expressly incorporated by reference. Winter describes a CDR-grafting method which may be used to prepare the humanized antibodies of the present invention (UK Patent Application GB 2188638A, filed on Mar. 26, 1987; Winter U.S. Pat. No. 5,225,539), the contents of which is expressly incorporated by reference.

[0857] Also within the scope of the invention are humanized antibody molecules in which specific amino acids have been substituted, deleted or added. Criteria for selecting amino acids from the donor are described in U.S. Pat. No. 5,585,089, e.g., columns 12-16 of U.S. Pat. No. 5,585,089, e.g., columns 12-16 of U.S. Pat. No. 5,585,089, the contents of which are hereby incorporated by reference. Other techniques for humanizing antibodies are described in Padlan et al. EP 519596 A1, published on Dec. 23, 1992.

[0858] The antibody molecule can be a single chain antibody. A single-chain antibody (scFV) may be engineered (see, for example, Colcher, D. et al. (1999) Ann N Y Acad Sci 880:263-80; and Reiter, Y. (1996) Clin Cancer Res 2:245-52). The single chain antibody can be dimerized or multimerized to generate multivalent antibodies having specificities for different epitopes of the same target protein.

[0859] In yet other embodiments, the antibody molecule has a heavy chain constant region chosen from, e.g., the heavy chain constant regions of IgG1, IgG2, IgG3, IgG4, IgM, IgA1, IgA2, IgD, and IgE; particularly, chosen from, e.g., the (e.g., human) heavy chain constant regions of IgG1, IgG2, IgG3, and IgG4. In another embodiment, the antibody molecule has a light chain constant region chosen from, e.g., the (e.g., human) light chain constant regions of kappa or lambda. The constant region can be altered, e.g., mutated, to modify the properties of the antibody (e.g., to increase or decrease one or more of: Fc receptor binding, antibody glycosylation, the number of cysteine residues, effector cell function, and/or complement function). In one embodiment the antibody has: effector function; and can fix complement. In other embodiments the antibody does not; recruit effector cells; or fix complement. In another embodiment, the antibody has reduced or no ability to bind an Fc receptor. For example, it is a isotype or subtype, fragment or other mutant, which does not support binding to an Fc receptor, e.g., it has a mutagenized or deleted Fc receptor binding region.

[0860] Methods for altering an antibody constant region are known in the art. Antibodies with altered function, e.g. altered affinity for an effector ligand, such as FcR on a cell, or the Cl component of complement can be produced by replacing at least one amino acid residue in the constant portion of the antibody with a different residue (see e.g., EP 388,151 A1, U.S. Pat. Nos. 5,624,821 and 5,648,260, the contents of all of which are hereby incorporated by reference). Similar type of alterations could be described which if applied to the murine, or other species immunoglobulin would reduce or eliminate these functions.

[0861] An antibody molecule can be derivatized or linked to another functional molecule (e.g., another peptide or protein). As used herein, a “derivatized” antibody molecule is one that has been modified. Methods of derivatization include but are not limited to the addition of a fluorescent moiety, a radionucleotide, a toxin, an enzyme or an affinity ligand such as biotin. Accordingly, the antibody molecules of the invention are intended to include derivatized and otherwise modified forms of the antibodies described herein, including immunoadhesion molecules. For example, an antibody molecule can be functionally linked (by chemical coupling, genetic fusion, noncovalent association or otherwise) to one or more other molecular entities, such as another antibody (e.g., a bispecific antibody or a diabody), a detectable agent, a cytotoxic agent, a pharmaceutical agent, and/or a protein or peptide that can mediate association of the antibody or antibody portion with another molecule (such as a streptavidin core region or a polyhistidine tag).

[0862] One type of derivatized antibody molecule is produced by crosslinking two or more antibodies (of the same type or of different types, e.g., to create bispecific antibodies). Suitable crosslinkers include those that are heterobifunctional, having two distinctly reactive groups separated by an appropriate spacer (e.g., m-maleimidobenzoyl-N-hydroxysuccinimide ester) or homobifunctional (e.g., disuccinimidyl suberate). Such linkers are available from Pierce Chemical Company, Rockford, Ill.

### Multispecific or Multifunctional Antibody Molecules

[0863] Exemplary structures of multispecific and multifunctional molecules defined herein are described throughout. Exemplary structures are further described in: Weidle U et al. (2013) The Intriguing Options of Multispecific Antibody Formats for Treatment of Cancer. Cancer Genomics & Proteomics 10: 1-18 (2013); and Spiess C et al. (2015) Alternative molecular formats and therapeutic applications for bispecific antibodies. Molecular Immunology 67: 95-106; the full contents of each of which is incorporated by reference herein).

[0864] In embodiments, multispecific antibody molecules can comprise more than one antigen-binding site, where different sites are specific for different antigens. In embodiments, multispecific antibody molecules can bind more than one (e.g., two or more) epitopes on the same antigen. In embodiments, multispecific antibody molecules comprise an antigen-binding site specific for a target cell (e.g., cancer cell) and a different antigen-binding site specific for an immune effector cell. In one embodiment, the multispecific antibody molecule is a bispecific antibody molecule. Bispecific antibody molecules can be classified into five different structural groups: (i) bispecific immunoglobulin G (BsIgG); (ii) IgG appended with an additional antigen-binding moiety; (iii) bispecific antibody fragments; (iv) bispecific fusion proteins; and (v) bispecific antibody conjugates.

[0865] BsIgG is a format that is monovalent for each antigen. Exemplary BsIgG formats include but are not limited to crossMab, DAF (two-in-one), DAF (four-in-one), DutaMab, DT-IgG, knobs-in-holes common LC, knobs-in-holes assembly, charge pair, Fab-arm exchange, SEEDbody, triomab, LUZ-Y, Fcab, κλ-body, orthogonal Fab. See Spiess et al. Mol. Immunol. 67(2015):95-106. Exemplary BsIgGs include catumaxomab (Fresenius Biotech, Trion Pharma, Neopharm), which contains an anti-CD3 arm and an anti-EpCAM arm; and ertumaxomab (Neovii Biotech, Fresenius Biotech), which targets CD3 and HER2. In some embodiments, BsIgG comprises heavy chains that are engineered for heterodimerization. For example, heavy chains can be engineered for heterodimerization using a “knobs-into-holes” strategy, a SEED platform, a common heavy chain (e.g., in κλ-bodies), and use of heterodimeric Fc regions. See Spiess et al. Mol. Immunol. 67(2015):95-106. Strategies that have been used to avoid heavy chain pairing of homodimers in BsIgG include knobs-in-holes, duobody, azymetric, charge pair, HA-TF, SEEDbody, and differential protein A affinity. See Id. BsIgG can be produced by separate expression of the component antibodies in different host cells and subsequent purification/assembly into a BsIgG. BsIgG can also be produced by expression of the component antibodies in a single host cell. BsIgG can be purified using affinity chromatography, e.g., using protein A and sequential pH elution.

[0866] IgG appended with an additional antigen-binding moiety is another format of bispecific antibody molecules. For example, monospecific IgG can be engineered to have bispecificity by appending an additional antigen-binding unit onto the monospecific IgG, e.g., at the N- or C-terminus of either the heavy or light chain. Exemplary additional antigen-binding units include single domain antibodies (e.g., variable heavy chain or variable light chain), engineered protein scaffolds, and paired antibody variable domains (e.g., single chain variable fragments or variable fragments). See Id. Examples of appended IgG formats include dual variable domain IgG (DVD-Ig), IgG(H)-scFv, scFv-(H)IgG, IgG(L)-scFv, scFv-(L)IgG, IgG(L,H)-Fv, IgG(H)-V, V(H)—IgG, IgG(L)-V, V(L)-IgG, KIH IgG-scFab, 2scFv-IgG, IgG-2scFv, scFv4-Ig, zybody, and DVI-IgG (four-in-one). See Spiess et al. Mol. Immunol. 67(2015):95-106. An example of an IgG-scFv is MM-141 (Merrimack Pharmaceuticals), which binds IGF-1R and HER3. Examples of DVD-Ig include ABT-981 (AbbVie), which binds IL-1α and IL-1β; and ABT-122 (AbbVie), which binds TNF and IL-17A.

[0867] Bispecific antibody fragments (BsAb) are a format of bispecific antibody molecules that lack some or all of the antibody constant domains. For example, some BsAb lack an Fc region. In embodiments, bispecific antibody fragments include heavy and light chain regions that are connected by a peptide linker that permits efficient expression of the BsAb in a single host cell. Exemplary bispecific antibody fragments include but are not limited to nanobody, nanobody-HAS, BiTE, Diabody, DART, TandAb, scDiabody, scDiabody-CH3, Diabody-CH3, triple body, miniantibody, minibody, TriBi minibody, scFv-CH3 KIH, Fab-scFv, scFv-CH-CL-scFv, F(ab′)2, F(ab′)2-scFv2, scFv-KIH, Fab-scFv-Fc, tetravalent HCAb, scDiabody-Fc, Diabody-Fc, tandem scFv-Fc, and intrabody. See Id. For example, the BiTE format comprises tandem scFvs, where the component scFvs bind to CD3 on T cells and a surface antigen on cancer cells

[0868] Bispecific fusion proteins include antibody fragments linked to other proteins, e.g., to add additional specificity and/or functionality. An example of a bispecific fusion protein is an immTAC, which comprises an anti-CD3 scFv linked to an affinity-matured T-cell receptor that recognizes HLA-presented peptides. In embodiments, the dock-and-lock (DNL) method can be used to generate bispecific antibody molecules with higher valency. Also, fusions to albumin binding proteins or human serum albumin can be extend the serum half-life of antibody fragments. See Id.

[0869] In embodiments, chemical conjugation, e.g., chemical conjugation of antibodies and/or antibody fragments, can be used to create BsAb molecules. See Id. An exemplary bispecific antibody conjugate includes the CovX-body format, in which a low molecular weight drug is conjugated site-specifically to a single reactive lysine in each Fab arm or an antibody or fragment thereof. In embodiments, the conjugation improves the serum half-life of the low molecular weight drug. An exemplary CovX-body is CVX-241 (NCT01004822), which comprises an antibody conjugated to two short peptides inhibiting either VEGF or Ang2. See Id.

[0870] The antibody molecules can be produced by recombinant expression, e.g., of at least one or more component, in a host system. Exemplary host systems include eukaryotic cells (e.g., mammalian cells, e.g., CHO cells, or insect cells, e.g., SF9 or S2 cells) and prokaryotic cells (e.g., E. coli). Bispecific antibody molecules can be produced by separate expression of the components in different host cells and subsequent purification/assembly. Alternatively, the antibody molecules can be produced by expression of the components in a single host cell. Purification of bispecific antibody molecules can be performed by various methods such as affinity chromatography, e.g., using protein A and sequential pH elution. In other embodiments, affinity tags can be used for purification, e.g., histidine-containing tag, myc tag, or streptavidin tag.

[0871] Exemplary Bispecific Molecules

[0872] In an aspect, a multispecific molecule disclosed herein comprises a sequence disclosed herein, e.g., a sequence chosen from SEQ ID NOs: 1004-1007, 3275-3277, 3286, or 3287, or a sequence with at least 85%, 90%, 955, 96%, 97%, 98%, 99% or more identity thereto. In some embodiments, a multispecific molecule disclosed herein comprises a leader sequence comprising the amino acid sequence of SEQ ID NO: 3288. In some embodiments, a multispecific molecule disclosed herein does not comprise a leader sequence comprising the amino acid sequence of SEQ ID NO: 3288.

Molecule F: aCD19 x aVb6.5
Molecule F comprises a heavy chain comprising the
amino acid sequence of SEQ ID NO: 1004 and a light
chain comprising the amino acid sequence of
SEQ ID NO: 1005.
Molecule F.1
(heavy chain) (Tcrvbeta6_5 scFv/anti-CD19
heavy chain)
SEQ ID NO: 1004
METDTLLLWVLLLWVPGSTGQVQLVQSGAEVKKPG
SSVKVSCKASGYSFTTYYIHWVRQAPGQGLEWMGW
FFPGSGNIKYNEKFKGRVTITADTSTSTAYMELSS
LRSEDTAVYYCAGSYYSYDVLDYWGQGTTVTVSSG
GGGSGGGGSGGGGSGGGGSDIQMTQSPSFLSASVG
DRVTITCKASQNVGINVVWHQQKPGKAPKALIYSS
SHRYSGVPSRFSGSGSGTEFTLTISSLQPEDFATY
FCQQFKSYPLTFGQGTKLEIKGGGGSQVTLRESGP
ALVKPTQTLTLTCTFSGFSLSTSGMGVGWIRQPPG
KALEWLAHIWWDDDKRYNPALKSRLTISKDTSKNQ
VFLTMTNMDPVDTATYYCARMELWSYYFDYWGQGT
TVTVSSASTKGPSVFPLAPSSKSTSGGTAALGCLV
KDYFPEPVTVSWNSGALTSGVHTFPAVLQSSGLYS
LSSVVTVPSSSLGTQTYICNVNHKPSNTKVDKKVE
PKSCDKTHTCPPCPAP
ELLGGPSVFLFPPKPKDTLMISRTPEVTCVVVDVS
HEDPEVKFNWYVDGVEVHNAKTKPREEQYASTYRV
VSVLTVLHQDWLNGKEYKCKVSNKALPAPIEKTIS
KAKGQPREPQVYTLPPSREEMTKNQVSLTCLVKGF
YPSDIAVEWESNGQPENNYKTTPPVLDSDGSFFLY
SKLTVDKSRWQQGNVFSCSVMHEALHNHYTQKSLS
LSPGK
Molecule F.2
(light chain) (anti-CD19 light chain)
SEQ ID NO: 1005
METPAQLLFLLLLWLPDTTGENVLTQSPATLSLSP
GERATLSCSASSSVSYMHWYQQKPGQAPRLLIYDT
SKLASGIPARFSGSGSGTDHTLTISSLEPEDFAVY
YCFQGSVYPFTFGQGTKLEIKRTVAAPSVFIFPPS
DEQLKSGTASVVCLLNNFYPREAKVQWKVDNALQS
GNSQESVTEQDSKDSTYSLSSTLTLSKADYEKHKV
YACEVTHQGLSSPVTKSFNRGEC

[0873] In an aspect, a multispecific molecule disclosed herein comprises SEQ ID NO: 1004 and/or SEQ ID NO: 1005 or a sequence with at least 85%, 90%, 955, 96%, 97%, 98%, 99% or more identity thereto.

[0874] Molecule G: aBCMA×aVb6.5

[0875] Molecule G comprises a heavy chain comprising the amino acid sequence of SEQ ID NO: 1006 and a light chain comprising the amino acid sequence of SEQ ID NO: 1007.

Molecule G.1
(heavy chain)
SEQ ID NO: 1006
METDTLLLWVLLLWVPGSTGQVQLVQSGAEVKKPG
SSVKVSCKASGYSFTTYYIHWVRQAPGQGLEWMGW
FFPGSGNIKYNEKFKGRVTITADTSTSTAYMELSS
LRSEDTAVYYCAGSYYSYDVLDYWGQGTTVTVSSG
GGGSGGGGSGGGGSGGGGSDIQMTQSPSFLSASVG
DRVTITCKASQNVGINVVWHQQKPGKAPKALIYSS
SHRYSGVPSRFSGSGSGTEFTLTISSLQPEDFATY
FCQQFKSYPLTFGQGTKLEIKGGGGSQVQLVESGG
GVVQPGRSLRLSCAASGIDFSRYWMSWVRQAPGKG
LEWVGEINPDSSTINYAPSLKDRFTISRDNSKNTL
YLQMSSLRAEDTAVYYCASLYYDYGDAMDYWGQGT
TVTVSSASTKGPSVFPLAPSSKSTSGGTAALGCLV
KDYFPEPVTVSWNSGALTSGVHTFPAVLQSSGLYS
LSSVVTVPSSSLGTQTYICNVNHKPSNTKVDKKVE
PKSCDKTHTCPPCPAPELLGGPSVFLFPPKPKDTL
MISRTPEVTCVVVDVSHEDPEVKFNWYVDGVEVHN
AKTKPREEQYASTYRVVSVLTVLHQDWLNGKEYKC
KVSNKALPAPIEKTISKAKGQPREPQVYTLPPSRE
EMTKNQVSLTCLVKGFYPSDIAVEWESNGQPENNY
KTTPPVLDSDGSFFLYSKLTVDKSRWQQGNVFSCS
VMHEALHNRFTQKSLSLSPGK
Molecule G.2
(light chain)
SEQ ID NO: 1007
METDTLLLWVLLLWVPGSTGDIQMTQSPSSLSASV
GDRVTITCKASQSVDSNVAWYQQKPEKAPKALIFS
ASLRFSGVPSRFSGSGSGTDFTLTISSLQPEDFAT
YFCQQYNNYPLTFGQGTKLEIKRTVAAPSVFIFPP
SDEQLKSGTASVVCLLNNFYPREAKVQWKVDNALQ
SGNSQESVTEQDSKDSTYSLSSTLTLSKADYEKHK
VYACEVTHQGLSSPVTKSFNRGEC

[0876] In an aspect, a multispecific molecule disclosed herein comprises SEQ ID NO: 1006 and/or SEQ ID NO: 1007 or a sequence with at least 85%, 90%, 955, 96%, 97%, 98%, 99% or more identity thereto.

[0877] Molecule H: aBCMA×aTCRvbeta6_5

[0878] Molecule H comprises a first heavy chain comprising the amino acid sequence of SEQ ID NO: 3275, a light chain comprising the amino acid sequence of SEQ ID NO: 3277, and a second heavy chain comprising the amino acid sequence of SEQ ID NO: 3276.

Molecule H.1
(anti-BCMA heavy chain)
SEQ ID NO: 3275
METDTLLLWVLLLWVPGSTGQVQLVESGGGVVQPG
RSLRLSCAASGIDFSRYWMSWVRQAPGKGLEWVGE
INPDSSTINYAPSLKDRFTISRDNSKNTLYLQMSS
LRAEDTAVYYCASLYYDYGDAMDYWGQGTTVTVSS
ASTKGPSVFPLAPSSKSTSGGTAALGCLVKDYFPE
PVTVSWNSGALTSGVHTFPAVLQSSGLYSLSSVVT
VPSSSLGTQTYICNVNHKPSNTKVDKRVEPKSCDK
THTCPPCPAPELLGGPSVFLFPPKPKDTLMISRTP
EVTCVVVDVSHEDPEVKFNWYVDGVEVHNAKTKPR
EEQYNATYRVVSVLTVLHQDWLNGKEYKCKVSNKA
LPAPIEKTISKAKGQPREPQVYTLPPCREEMTKNQ
VSLWCLVKGFYPSDIAVEWESNGQPENNYKTTPPV
LDSDGSFFLYSKLTVDKSRWQQGNVFSCSVMHEAL
HNHYTQKSLSLSPGK
Molecule H.2
(TCRvbeta_6_5 scFv humanized)
SEQ ID NO: 3276
METDTLLLWVLLLWVPGSTGQVQLVQSGAEVKKPG
SSVKVSCKASGYSFTTYYIHWVRQAPGQGLEWMGW
FFPGSGNIKYNEKFKGRVTITADTSTSTAYMELSS
LRSEDTAVYYCAGSYYSYDVLDYWGQGTTVTVSSG
GGGSGGGGSGGGGSGGGGSDIQMTQSPSFLSASVG
DRVTITCKASQNVGINVVWHQQKPGKAPKALIYSS
SHRYSGVPSRFSGSGSGTEFTLTISSLQPEDFATY
FCQQFKSYPLTFGQGTKLEIKGGGGSGGGGSDKTH
TCPPCPAPELLGGPSVFLFPPKPKDTLMISRTPEV
TCVVVDVSHEDPEVKFNWYVDGVEVHNAKTKPREE
QYASTYRVVSVLTVLHQDWLNGKEYKCKVSNKALP
APIEKTISKAKGQPREPQVCTLPPSREEMTKNQVS
LSCAVKGFYPSDIAVEWESNGQPENNYKTTPPVLD
SDGSFFLVSKLTVDKSRWQQGNVFSCSVMHEALHN
HYTQKSLSLSPGK
Molecule H.3
(anti-BCMA light chain)
SEQ ID NO: 3277
METDTLLLWVLLLWVPGSTGDIQMTQSPSSLSASV
GDRVTITCKASQSVDSNVAWYQQKPEKAPKALIFS
ASLRFSGVPSRFSGSGSGTDFTLTISSLQPEDFAT
YFCQQYNNYPLTFGQGTKLEIKRTVAAPSVFIFPP
SDEQLKSGTASVVCLLNNFYPREAKVQWKVDNALQ
SGNSQESVTEQDSKDSTYSLSSTLTLSKADYEKHK
VYACEVTHQGLSSPVTKSFNRGEC

[0879] In an aspect, a multispecific molecule disclosed herein comprises SEQ ID NO: 3275, SEQ ID NO: 3276, and/or SEQ ID NO: 3277 or a sequence with at least 85%, 90%, 955, 96%, 97%, 98%, 99% or more identity thereto.

[0880] Molecule I: half arm BCMA Fab with c-terminal scFv TCRvbeta

[0881] Molecule I comprises a first heavy chain comprising the amino acid sequence of SEQ ID NO: 3286, a light chain comprising the amino acid sequence of SEQ ID NO: 3277, and a second heavy chain comprising the amino acid sequence of SEQ ID NO: 3287.

Molecule I.1
(heavy chain 1)
SEQ ID NO: 3286
METDTLLLWVLLLWVPGSTGQVQLVESGGGVVQPG
RSLRLSCAASGIDFSRYWMSWVRQAPGKGLEWVGE
INPDSSTINYAPSLKDRFTISRDNSKNTLYLQMSS
LRAEDTAVYYCASLYYDYGDAMDYWGQGTTVTVSS
ASTKGPSVFPLAPSSKSTSGGTAALGCLVKDYFPE
PVTVSWNSGALTSGVHTFPAVLQSSGLYSLSSVVT
VPSSSLGTQTYICNVNHKPSNTKVDKRVEPKSCDK
THTCPPCPAPELLGGPSVFLFPPKPKDTLMISRTP
EVTCVVVDVSHEDPEVKFNWYVDGVEVHNAKTKPR
EEQYNSTYRVVSVLTVLHQDWLNGKEYKCKVSNKA
LPAPIEKTISKAKGQPREPQVYTLPPCREEMTKNQ
VSLWCLVKGFYPSDIAVEWESNGQPENNYKTTPPV
LDSDGSFFLYSKLTVDKSRWQQGNVFSCSVMHEAL
HNHYTQKSLSLSPGKGGGGSGGGGSGGGGSEVQLV
ESGGGLVQPGGSLRLSCAASGFTFSTYAMNWVRQA
PGKGLEWVSRIRSKYNNYATYYADSVKDRFTISRD
DSKNTLYLQMNSLKTEDTAVYYCVRHGNFGNSYVS
WFAYWGQGTLVTVSSGGGGSGGGGSGGGGSGGGGS
QAVVTQEPSLTVSPGGTVTLTCRSSTGAVTTSNYA
NWVQQKPGQAPRGLIGGTNKRAPWTPARFSGSLLG
GKAALTLSGAQPEDEAEYYCALWYSNLWVFGGGTK
LTVL
Molecule I.2
(light chain)
SEQ ID NO: 3277
METDTLLLWVLLLWVPGSTGDIQMTQSPSSLSASV
GDRVTITCKASQSVDSNVAWYQQKPEKAPKALIFS
ASLRFSGVPSRFSGSGSGTDFTLTISSLQPEDFAT
YFCQQYNNYPLTFGQGTKLEIKRTVAAPSVFIFPP
SDEQLKSGTASVVCLLNNFYPREAKVQWKVDNALQ
SGNSQESVTEQDSKDSTYSLSSTLTLSKADYEKHK
VYACEVTHQGLSSPVTKSFNRGEC
Molecule I.3
(heavy chain 2)
SEQ ID NO: 3287
METDTLLLWVLLLWVPGSTGDKTHTCPPCPAPELL
GGPSVFLFPPKPKDTLMISRTPEVTCVVVDVSHED
PEVKFNWYVDGVEVHNAKTKPREEQYNSTYRVVSV
LTVLHQDWLNGKEYKCKVSNKALPAPIEKTISKAK
GQPREPQVCTLPPSREEMTKNQVSLSCAVKGFYPS
DIAVEWESNGQPENNYKTTPPVLDSDGSFFLVSKL
TVDKSRWQQGNVFSCSVMHEALHNHYTQKSLSLSP
GK

[0882] In an aspect, a multispecific molecule disclosed herein comprises SEQ ID NO: 3286, SEQ ID NO: 3277, and/or SEQ ID NO: 3287 or a sequence with at least 85%, 90%, 955, 96%, 97%, 98%, 99% or more identity thereto.

### Antibody-Like Frameworks or Scaffolds

[0883] A wide variety of antibody/immunoglobulin frameworks or scaffolds can be employed in the anti-TCRvb antibody molecules disclosed herein or multifunctional formats thereof so long as the resulting polypeptide includes at least one binding region which specifically binds to the target antigen, e.g., a TCRvb, a tumor antigen, among others. Such frameworks or scaffolds include the 5 main idiotypes of human immunoglobulins, or fragments thereof, and include immunoglobulins of other animal species, preferably having humanized aspects. Novel frameworks, scaffolds and fragments continue to be discovered and developed by those skilled in the art.

[0884] In one embodiment, the anti-TCRvb antibody molecules disclosed herein or multifunctional formats thereof include non-immunoglobulin based antibodies using non-immunoglobulin scaffolds onto which CDRs can be grafted. Any non-immunoglobulin frameworks and scaffolds may be employed, as long as they comprise a binding region specific for the target antigen (e.g., TCRvb or a tumor antigen). Exemplary non-immunoglobulin frameworks or scaffolds include, but are not limited to, fibronectin (Compound Therapeutics, Inc., Waltham, Mass.), ankyrin (Molecular Partners AG, Zurich, Switzerland), domain antibodies (Domantis, Ltd., Cambridge, Mass., and Ablynx nv, Zwijnaarde, Belgium), lipocalin (Pieris Proteolab AG, Freising, Germany), small modular immuno-pharmaceuticals (Trubion Pharmaceuticals Inc., Seattle, Wash.), maxybodies (Avidia, Inc., Mountain View, Calif.), Protein A (Affibody AG, Sweden), and affilin (gamma-crystallin or ubiquitin) (Scil Proteins GmbH, Halle, Germany).

[0885] Fibronectin scaffolds are typically based on fibronectin type III domain (e.g., the tenth module of the fibronectin type III (10 Fn3 domain)). The fibronectin type III domain has 7 or 8 beta strands which are distributed between two beta sheets, which themselves pack against each other to form the core of the protein, and further containing loops (analogous to CDRs) which connect the beta strands to each other and are solvent exposed. There are at least three such loops at each edge of the beta sheet sandwich, where the edge is the boundary of the protein perpendicular to the direction of the beta strands (see U.S. Pat. No. 6,818,418). Because of this structure, the non-immunoglobulin antibody mimics antigen binding properties that are similar in nature and affinity to those of antibodies. These scaffolds can be used in a loop randomization and shuffling strategy in vitro that is similar to the process of affinity maturation of antibodies in vivo. These fibronectin-based molecules can be used as scaffolds where the loop regions of the molecule can be replaced with CDRs of the invention using standard cloning techniques.

[0886] The ankyrin technology is based on using proteins with ankyrin derived repeat modules as scaffolds for bearing variable regions which can be used for binding to different targets. The ankyrin repeat module typically is a about 33 amino acid polypeptide consisting of two anti-parallel α-helices and a β-turn. Binding of the variable regions can be optimized by using ribosome display.

[0887] Avimers are used by nature for protein-protein interactions and in human over 250 proteins are structurally based on A-domains. Avimers consist of a number of different “A-domain” monomers (2-10) linked via amino acid linkers. Avimers can be created that can bind to the target antigen using the methodology described in, for example, U.S. Patent Application Publication Nos. 20040175756; 20050053973; 20050048512; and 20060008844.

[0888] Affibody affinity ligands are small, simple proteins composed of a three-helix bundle based on the scaffold of one of the IgG-binding domains of Protein A. Protein A is a surface protein from the bacterium Staphylococcus aureus. This scaffold domain consists of 58 amino acids, 13 of which are randomized to generate affibody libraries with a large number of ligand variants (See e.g., U.S. Pat. No. 5,831,012). Affibody molecules mimic antibodies, they have a molecular weight of 6 kDa, compared to the molecular weight of antibodies, which is 150 kDa. In spite of its small size, the binding site of affibody molecules is similar to that of an antibody.

[0889] Anticalins are known commercially, e.g., Pieris ProteoLab AG. They are derived from lipocalins, a widespread group of small and robust proteins that are usually involved in the physiological transport or storage of chemically sensitive or insoluble compounds. Several natural lipocalins occur in human tissues or body liquids. The protein architecture is reminiscent of immunoglobulins, with hypervariable loops on top of a rigid framework. However, in contrast with antibodies or their recombinant fragments, lipocalins are composed of a single polypeptide chain with 160 to 180 amino acid residues, being just marginally bigger than a single immunoglobulin domain. The set of four loops, which makes up the binding pocket, shows pronounced structural plasticity and tolerates a variety of side chains. The binding site can thus be reshaped in a proprietary process in order to recognize prescribed target molecules of different shape with high affinity and specificity. One protein of lipocalin family, the bilin-binding protein (BBP) of Pieris Brassicae has been used to develop anticalins by mutagenizing the set of four loops. One example of a patent application describing anticalins is in PCT Publication No. WO 199916873.

[0890] Affilin molecules are small non-immunoglobulin proteins which are designed for specific affinities towards proteins and small molecules. New affilin molecules can be very quickly selected from two libraries, each of which is based on a different human derived scaffold protein. Affilin molecules do not show any structural homology to immunoglobulin proteins. Currently, two affilin scaffolds are employed, one of which is gamma crystalline, a human structural eye lens protein and the other is “ubiquitin” superfamily proteins. Both human scaffolds are very small, show high temperature stability and are almost resistant to pH changes and denaturing agents. This high stability is mainly due to the expanded beta sheet structure of the proteins. Examples of gamma crystalline derived proteins are described in WO200104144 and examples of “ubiquitin-like” proteins are described in WO2004106368.

[0891] Protein epitope mimetics (PEM) are medium-sized, cyclic, peptide-like molecules (MW 1-2 kDa) mimicking beta-hairpin secondary structures of proteins, the major secondary structure involved in protein-protein interactions.

[0892] Domain antibodies (dAbs) can be used in the anti-TCRvb antibody molecules disclosed herein or multifunctional formats thereof are small functional binding fragments of antibodies, corresponding to the variable regions of either the heavy or light chains of antibodies. Domain antibodies are well expressed in bacterial, yeast, and mammalian cell systems. Further details of domain antibodies and methods of production thereof are known in the art (see, for example, U.S. Pat. Nos. 6,291,158; 6,582,915; 6,593,081; 6,172,197; 6,696,245; European Patents 0368684 & 0616640; WO05/035572, WO04/101790, WO04/081026, WO04/058821, WO04/003019 and WO03/002609. Nanobodies are derived from the heavy chains of an antibody.

[0893] A nanobody typically comprises a single variable domain and two constant domains (CH2 and CH3) and retains antigen-binding capacity of the original antibody. Nanobodies can be prepared by methods known in the art (See e.g., U.S. Pat. Nos. 6,765,087, 6,838,254, WO 06/079372). Unibodies consist of one light chain and one heavy chain of an IgG4 antibody. Unibodies may be made by the removal of the hinge region of IgG4 antibodies. Further details of unibodies and methods of preparing them may be found in WO2007/059782.

### Tumor Antigen Moiety

[0894] In an aspect, provided herein is a multispecific molecule, e.g., a bispecific molecule, comprising:

[0895] (i) a first moiety (e.g., a first immune cell engager) comprising the anti-TCRβV antibody molecule described herein; and

[0896] (ii) a second moiety comprising one or more of: a tumor-targeting moiety; a second immune cell engager; a cytokine molecule or a stromal modifying moiety.

[0897] In some embodiments of any of the compositions or methods disclosed herein, the tumor-targeting moiety is an antigen, e.g., a cancer antigen. In some embodiments, the cancer antigen is a tumor antigen or stromal antigen, or a hematological antigen.

[0898] In some embodiments of any of the compositions or methods disclosed herein, the tumor-targeting moiety, e.g., cancer antigen, is chosen from: BCMA, FcRH5, CD19, CD20, CD22, CD30, CD33, CD38, CD47, CD99, CD123, FcRH5, CLEC12, CD179A, SLAMF7, or NY-ESO1, PDL1, CD47, gangloside 2 (GD2), prostate stem cell antigen (PSCA), prostate specific membrane antigen (PMSA), prostate-specific antigen (PSA), carcinoembryonic antigen (CEA), Ron Kinase, c-Met, Immature laminin receptor, TAG-72, BING-4, Calcium-activated chloride channel 2, Cyclin-B1, 9D7, Ep-CAM, EphA3, Her2/neu, Telomerase, SAP-1, Survivin, NY-ESO-1/LAGE-1, PRAME, SSX-2, Melan-A/MART-1, Gp100/pme117, Tyrosinase, TRP-1/-2, MC1R, β-catenin, BRCA1/2, CDK4, CML66, Fibronectin, p53, Ras, TGF-B receptor, AFP, ETA, MAGE, MUC-1, CA-125, BAGE, GAGE, NY-ESO-1, β-catenin, CDK4, CDC27, a actinin-4, TRP1/gp75, TRP2, gp100, Melan-A/MART1, gangliosides, WT1, EphA3, Epidermal growth factor receptor (EGFR), MART-2, MART-1, MUC1, MUC2, MUM1, MUM2, MUM3, NA88-1, NPM, OA1, OGT, RCC, RUI1, RUI2, SAGE, TRG, TRP1, TSTA, Folate receptor alpha, L1-CAM, CAIX, gpA33, GD3, GM2, VEGFR, Integrins (Integrin alphaVbeta3, Integrin alpha5Beta1), Carbohydrates (Le), IGF1R, EPHA3, TRAILR1, TRAILR2, RANKL, (FAP), TGF-beta, hyaluronic acid, collagen, e.g., collagen IV, tenascin C, or tenascin W. In some embodiments, the tumor-targeting moiety, e.g., cancer antigen, is BCMA. In some embodiments, the tumor-targeting moiety, e.g., cancer antigen, is FcRH5.

[0899] In some embodiments of any of the compositions or methods disclosed herein, the tumor-targeting moiety, e.g., cancer antigen, is chosen from: CD19, CD123, CD22, CD30, CD171, CS-1, C-type lectin-like molecule-1, CD33, epidermal growth factor receptor variant III (EGFRvIII), ganglioside G2 (GD2), ganglioside GD3, TNF receptor family member B cell maturation (BCMA), Tn antigen ((Tn Ag) or (GalNAca-Ser/Thr)), prostate-specific membrane antigen (PSMA), Receptor tyrosine kinase-like orphan receptor 1 (ROR1), Fms-Like Tyrosine Kinase 3 (FLT3), Tumor-associated glycoprotein 72 (TAG72), CD38, CD44v6, Carcinoembryonic antigen (CEA), Epithelial cell adhesion molecule (EPCAM), B7H3 (CD276), KIT (CD117), Interleukin-13 receptor subunit alpha-2, mesothelin, Interleukin 11 receptor alpha (IL-11Ra), prostate stem cell antigen (PSCA), Protease Serine 21, vascular endothelial growth factor receptor 2 (VEGFR2), Lewis(Y) antigen, CD24, Platelet-derived growth factor receptor beta (PDGFR-beta), Stage-specific embryonic antigen-4 (SSEA-4), CD20, Folate receptor alpha, Receptor tyrosine-protein kinase ERBB2 (Her2/neu), Mucin 1, cell surface associated (MUC1), epidermal growth factor receptor (EGFR), neural cell adhesion molecule (NCAM), Prostase, prostatic acid phosphatase (PAP), elongation factor 2 mutated (ELF2M), Ephrin B2, fibroblast activation protein alpha (FAP), insulin-like growth factor 1 receptor (IGF-I receptor), carbonic anhydrase IX (CAIX), Proteasome (Prosome, Macropain) Subunit, Beta Type, 9 (LMP2), glycoprotein 100 (gp100), oncogene fusion protein consisting of breakpoint cluster region (BCR) and Abelson murine leukemia viral oncogene homolog 1 (Abl) (bcr-abl), tyrosinase, ephrin type-A receptor 2 (EphA2), Fucosyl GM1, sialyl Lewis adhesion molecule (sLe), ganglioside GM3, transglutaminase 5 (TGS5), high molecular weight-melanoma-associated antigen (HMWMAA), o-acetyl-GD2 ganglioside (OAcGD2), Folate receptor beta, tumor endothelial marker 1 (TEM1/CD248), tumor endothelial marker 7-related (TEM7R), claudin 6 (CLDN6), thyroid stimulating hormone receptor (TSHR), G protein-coupled receptor class C group 5, member D (GPRC5D), chromosome X open reading frame 61 (CXORF61), CD97, CD179a, anaplastic lymphoma kinase (ALK), Polysialic acid, placenta-specific 1 (PLAC1), hexasaccharide portion of globoH glycoceramide (GloboH), mammary gland differentiation antigen (NY-BR-1), uroplakin 2 (UPK2), Hepatitis A virus cellular receptor 1 (HAVCR1), adrenoceptor beta 3 (ADRB3), pannexin 3 (PANX3), G protein-coupled receptor 20 (GPR20), lymphocyte antigen 6 complex, locus K 9 (LY6K), Olfactory receptor 51E2 (OR51E2), TCR Gamma Alternate Reading Frame Protein (TARP), Wilms tumor protein (WT1), Cancer/testis antigen 1 (NY-ESO-1), Cancer/testis antigen 2 (LAGE-1a), Melanoma-associated antigen 1 (MAGE-A1), ETS translocation-variant gene 6, located on chromosome 12p (ETV6-AML), sperm protein 17 (SPA17), X Antigen Family, Member 1A (XAGE1), angiopoietin-binding cell surface receptor 2 (Tie 2), melanoma cancer testis antigen-1 (MAD-CT-1), melanoma cancer testis antigen-2 (MAD-CT-2), Fos-related antigen 1, tumor protein p53 (p53), p53 mutant, prostein, surviving, telomerase, prostate carcinoma tumor antigen-1, melanoma antigen recognized by T cells 1, Rat sarcoma (Ras) mutant, human Telomerase reverse transcriptase (hTERT), sarcoma translocation breakpoints, melanoma inhibitor of apoptosis (ML-IAP), ERG (transmembrane protease, serine 2 (TMPRSS2) ETS fusion gene), N-Acetyl glucosaminyl-transferase V (NA17), paired box protein Pax-3 (PAX3), Androgen receptor, Cyclin B1, v-myc avian myelocytomatosis viral oncogene neuroblastoma derived homolog (MYCN), Ras Homolog Family Member C (RhoC), Tyrosinase-related protein 2 (TRP-2), Cytochrome P450 1B1 (CYP1B1), CCCTC-Binding Factor (Zinc Finger Protein)-Like, Squamous Cell Carcinoma Antigen Recognized By T Cells 3 (SART3), Paired box protein Pax-5 (PAX5), proacrosin binding protein sp32 (OY-TES1), lymphocyte-specific protein tyrosine kinase (LCK), A kinase anchor protein 4 (AKAP-4), synovial sarcoma, X breakpoint 2 (SSX2), Receptor for Advanced Glycation Endproducts (RAGE-1), renal ubiquitous 1 (RU1), renal ubiquitous 2 (RU2), legumain, human papilloma virus E6 (HPV E6), human papilloma virus E7 (HPV E7), intestinal carboxyl esterase, heat shock protein 70-2 mutated (mut hsp70-2), CD79a, CD79b, CD72, Leukocyte-associated immunoglobulin-like receptor 1 (LAIR1), Fc fragment of IgA receptor (FCAR or CD89), Leukocyte immunoglobulin-like receptor subfamily A member 2 (LILRA2), CD300 molecule-like family member f (CD300LF), C-type lectin domain family 12 member A (CLEC12A), bone marrow stromal cell antigen 2 (BST2), EGF-like module-containing mucin-like hormone receptor-like 2 (EMR2), lymphocyte antigen 75 (LY75), Glypican-3 (GPC3), Fc receptor-like 5 (FCRL5), or immunoglobulin lambda-like polypeptide 1 (IGLL1).

### FcRH5 Targeting Moieties

[0900] In some embodiments, the multispecific molecules disclosed herein include a targeting moiety that binds to FcRH5 (e.g., a FcRH5 targeting moiety). The FcRH5 targeting moiety can be chosen from an antibody molecule (e.g., an antigen binding domain as described herein), a receptor or a receptor fragment, or a ligand or a ligand fragment, or a combination thereof. In some embodiments, the FcRH5 targeting moiety associates with, e.g., binds to, a cancer or hematopoietic cell (e.g., a molecule, e.g., antigen, present on the surface of the cancer or hematopoietic cell). In certain embodiments, the FcRH5 targeting moiety targets, e.g., directs the multispecific molecules disclosed herein to a cancer or hematopoietic cell. In some embodiments, the cancer is a hematological cancer, e.g., multiple myeloma.

[0901] In some embodiments, the multispecific molecule, e.g., the FcRH5 targeting moiety, binds to a FcRH5 antigen on the surface of a cell, e.g., a cancer or hematopoietic cell. The FcRH5 antigen can be present on a primary tumor cell, or a metastatic lesion thereof. In some embodiments, the cancer is a hematological cancer, e.g., multiple myeloma. For example, the FcRH5 antigen can be present on a tumor, e.g., a tumor of a class typified by having one or more of: limited tumor perfusion, compressed blood vessels, or fibrotic tumor interstitium.

[0902] The multispecific molecules described herein includes a FcRH5 targeting moiety that comprises an anti-FcRH5 antibody or antigen-binding fragment thereof described in U.S. Pat. No. 7,999,077, US20150098900, U.S. Pat. Nos. 8,299,220, 7,105,149, 8,362,213, 8,466,260, 8,617,559, US20160368985, US20150166661, and US20080247944, the entire contents of any of the aforesaid publications are herein incorporated by reference.

[0903] In some embodiments, the multispecific molecules described herein includes a FcRH5 targeting moiety that comprises an anti-FcRH5 antibody or antigen-binding fragment thereof described in U.S. Pat. No. 7,999,077, the entire contents of which are herein incorporated by reference.

### BCMA Targeting Moieties

[0904] In certain embodiments, the multispecific molecules disclosed herein include a targeting moiety that binds to BCMA (e.g., a BCMA targeting moiety). The BCMA targeting moiety can be chosen from an antibody molecule (e.g., an antigen binding domain as described herein), a receptor or a receptor fragment, or a ligand or a ligand fragment, or a combination thereof. In some embodiments, the BCMA targeting moiety associates with, e.g., binds to, a cancer or hematopoietic cell (e.g., a molecule, e.g., antigen, present on the surface of the cancer or hematopoietic cell). In certain embodiments, the BCMA targeting moiety targets, e.g., directs the multispecific molecules disclosed herein to a cancer or hematopoietic cell. In some embodiments, the cancer is a hematological cancer, e.g., multiple myeloma.

[0905] In some embodiments, the multispecific molecule, e.g., the BCMA targeting moiety, binds to a BCMA antigen on the surface of a cell, e.g., a cancer or hematopoietic cell. The BCMA antigen can be present on a primary tumor cell, or a metastatic lesion thereof. In some embodiments, the cancer is a hematological cancer, e.g., multiple myeloma. For example, the BCMA antigen can be present on a tumor, e.g., a tumor of a class typified by having one or more of: limited tumor perfusion, compressed blood vessels, or fibrotic tumor interstitium.

### Exemplary BCMA Targeting Moieties

[0906] The multispecific molecules described herein can include a BCMA targeting moiety that comprises an anti-BCMA antibody or antigen-binding fragment thereof described in U.S. Pat. Nos. 8,920,776, 9,243,058, 9,340,621, 8,846,042, 7,083,785, 9,545,086, 7,276,241, 9,034,324, 7,799,902, 9,387,237, 8,821,883, US861745, US20130273055, US20160176973, US20150368351, US20150376287, US20170022284, US20160015749, US20140242077, US20170037128, US20170051068, US20160368988, US20160311915, US20160131654, US20120213768, US20110177093, US20160297885, EP3137500, EP2699259, EP2982694, EP3029068, EP3023437, WO2016090327, WO2017021450, WO2016110584, WO2016118641, WO2016168149, the entire contents of which are incorporated herein by reference.

[0907] In one embodiment, the BCMA-targeting moiety includes an antibody molecule (e.g., Fab or scFv) that binds to BCMA. In some embodiments, the antibody molecule to BCMA comprises one, two, or three CDRs from any of the heavy chain variable domain sequences of Table 1, or a closely related CDR, e.g., CDRs which have at least one amino acid alteration, but not more than two, three or four alterations (e.g., substitutions, deletions, or insertions, e.g., conservative substitutions) from any of the CDR sequences of Table 9. In some embodiments, the antibody molecule to BCMA comprises a heavy chain variable domain sequence chosen from any of the amino acid sequences of Table 9, or an amino acid sequence substantially identical thereto (e.g., 95% to 99.9% identical thereto, or having at least one amino acid alteration, but not more than five, ten or fifteen alterations (e.g., substitutions, deletions, or insertions, e.g., conservative substitutions)).

[0908] Alternatively, or in combination with the heavy chain to BCMA disclosed herein, the antibody molecule to BCMA comprises one, two, or three CDRs from any of the light chain variable domain sequences of Table 9, or a closely related CDR, e.g., CDRs which have at least one amino acid alteration, but not more than two, three or four alterations (e.g., substitutions, deletions, or insertions, e.g., conservative substitutions) from any of the CDR sequences of Table 9. In some embodiments, the antibody molecule to BCMA comprises a light chain variable domain sequence chosen from any of the amino acid sequences of Table 9, or an amino acid sequence substantially identical thereto (e.g., 95% to 99.9% identical thereto, or having at least one amino acid alteration, but not more than five, ten or fifteen alterations (e.g., substitutions, deletions, or insertions, e.g., conservative substitutions)).

TABLE 9
Amino acid sequences of exemplary variable
regions of anti-BCMA antibodies.

| SEQ | | |
|---|---|---|
| ID | | |
| NO | Description | Sequence |
| 3439 | 83A10 VH | EVQLLESGGGLVQPGGSLRLSCAASGFTFSSYAMSWVRQAPGKGL |
| | | EWVSAISGSGGSTYYADSVKGRFTISRDNSKNTLYLQMNSLRAED |
| | | TAVYYCAKVLGWFDYWGQGTLVTVSS |
| 3440 | 83A10 VL | EIVLTQSPGTLSLSPGERATLSCRASQSVSSSYLAWYQQKPGQAPR |
| | | LLIYGASSRATGIPDRFSGSGSGTDFTLTISRLEPEDFAVYYCQQYG |
| | | YPPDFTFGQGTKVEIK |
| 3441 | 17A5 VH | EVQLLESGGGLVQPGGSLRLSCAASGFTFSSYAMSWVRQAPGKGL |
| | | EWVSAISGSGGSTYYADSVKGRFTISRDNSKNTLYLQMNSLRAED |
| | | TAVYYCAKVAPYFAPFDYWGQGTLVTVSS |
| 3442 | 17A5 VL | EIVLTQSPGTLSLSPGERATLSCRASQSVSSSYLAWYQQKPGQAPR |
| | | LLIYGASSRATGIPDRFSGSGSGTDFTLTISRLEPEDFAVYYCQQYG |
| | | NPPLYTFGQGTKVEIK |
| 3443 | 13A4 VH | EVQLVQSGAEVKKPGESLKISCKGSGYSFTSYWIGWVRQMPGKGL |
| | | EWMGIIYPGDSDTRYSPSFQGQVTISADKSISTAYLQWSSLKASDT |
| | | AMYYCARNGYLGDYWGQGTLVTVSS |
| 3444 | 13A4 VL | DIVMTQSPLSLPVTPGEPASISCRSSQSLLHSNGYNYLDWYLQKPG |
| | | QSPQLLIYLGSNRASGVPDRFSGSGSGTDFTLKISRVEAEDVGVYY |
| | | CMQAMQIPTFGQGTKVEIK |
| 3445 | J22.9-xi VH | QVQLQQSGGGLVQPGGSLKLSCAASGIDFSRYWMSWVRRAPGKG |
| | | LEWIGEINPDSSTINYAPSLKDKFIISRDNAKNTLYLQMSKVRSEDT |
| | | ALYYCASLYYDYGDAMDYWGQGTSVTVSS |
| 3446 | J22.9-xi VL | DIVMTQSQRFMTTSVGDRVSVTCKASQSVDSNVAWYQQKPRQSP |
| | | KALIFSASLRFSGVPARFTGSGSGTDFTLTISNLQSEDLAEYFCQQY |
| | | NNYPLTFGAGTKLELKR |
| 3447 | 2A1 VH | EVQLVESGGGLVKPGGSLRLSCAASGFTFGDYALSWFRQAPGKGL |
| | | EWVGVSRSKAYGGTTDYAASVKGRFTISRDDSKSTAYLQMNSLKT |
| | | EDTAVYYCASSGYSSGWTPFDYWGQGTLVTVSS |
| 3448 | 2A1 VL | QSVLTQPPSASGTPGQRVTISCSGSSSNIGSNTVNWYQQLPGTAPKL |
| | | LIFNYHQRPSGVPDRFSGSKSGSSASLAISGLQSEDEADYYCAAWD |
| | | DSLNGWVFGGGTKLTVLG |

### CDR-Grafted Scaffolds

[0909] In embodiments, the antibody molecule is a CDR-grafted scaffold domain. In embodiments, the scaffold domain is based on a fibronectin domain, e.g., fibronectin type III domain. The overall fold of the fibronectin type III (Fn3) domain is closely related to that of the smallest functional antibody fragment, the variable domain of the antibody heavy chain. There are three loops at the end of Fn3; the positions of BC, DE and FG loops approximately correspond to those of CDR1, 2 and 3 of the VH domain of an antibody. Fn3 does not have disulfide bonds; and therefore Fn3 is stable under reducing conditions, unlike antibodies and their fragments (see, e.g., WO 98/56915; WO 01/64942; WO 00/34784). An Fn3 domain can be modified (e.g., using CDRs or hypervariable loops described herein) or varied, e.g., to select domains that bind to an antigen/marker/cell described herein.

[0910] In embodiments, a scaffold domain, e.g., a folded domain, is based on an antibody, e.g., a “minibody” scaffold created by deleting three beta strands from a heavy chain variable domain of a monoclonal antibody (see, e.g., Tramontano et al., 1994, J Mol. Recognit. 7:9; and Martin et al., 1994, EMBO J. 13:5303-5309). The “minibody” can be used to present two hypervariable loops. In embodiments, the scaffold domain is a V-like domain (see, e.g., Coia et al. WO 99/45110) or a domain derived from tendamistatin, which is a 74 residue, six-strand beta sheet sandwich held together by two disulfide bonds (see, e.g., McConnell and Hoess, 1995, J Mol. Biol. 250:460). For example, the loops of tendamistatin can be modified (e.g., using CDRs or hypervariable loops) or varied, e.g., to select domains that bind to a marker/antigen/cell described herein. Another exemplary scaffold domain is a beta-sandwich structure derived from the extracellular domain of CTLA-4 (see, e.g., WO 00/60070).

[0911] Other exemplary scaffold domains include but are not limited to T-cell receptors; MHC proteins; extracellular domains (e.g., fibronectin Type III repeats, EGF repeats); protease inhibitors (e.g., Kunitz domains, ecotin, BPTI, and so forth); TPR repeats; trifoil structures; zinc finger domains; DNA-binding proteins; particularly monomeric DNA binding proteins; RNA binding proteins; enzymes, e.g., proteases (particularly inactivated proteases), RNase; chaperones, e.g., thioredoxin, and heat shock proteins; and intracellular signaling domains (such as SH2 and SH3 domains). See, e.g., US 20040009530 and U.S. Pat. No. 7,501,121, incorporated herein by reference.

[0912] In embodiments, a scaffold domain is evaluated and chosen, e.g., by one or more of the following criteria: (1) amino acid sequence, (2) sequences of several homologous domains, (3) 3-dimensional structure, and/or (4) stability data over a range of pH, temperature, salinity, organic solvent, oxidant concentration. In embodiments, the scaffold domain is a small, stable protein domain, e.g., a protein of less than 100, 70, 50, 40 or 30 amino acids. The domain may include one or more disulfide bonds or may chelate a metal, e.g., zinc.

### Antibody-Based Fusions

[0913] A variety of formats can be generated which contain additional binding entities attached to the N or C terminus of antibodies. These fusions with single chain or disulfide stabilized Fvs or Fabs result in the generation of tetravalent molecules with bivalent binding specificity for each antigen. Combinations of scFvs and scFabs with IgGs enable the production of molecules which can recognize three or more different antigens.

### Antibody-Fab Fusion

[0914] Antibody-Fab fusions are bispecific antibodies comprising a traditional antibody to a first target and a Fab to a second target fused to the C terminus of the antibody heavy chain. Commonly the antibody and the Fab will have a common light chain. Antibody fusions can be produced by (1) engineering the DNA sequence of the target fusion, and (2) transfecting the target DNA into a suitable host cell to express the fusion protein. It seems like the antibody-scFv fusion may be linked by a (Gly)-Ser linker between the C-terminus of the CH3 domain and the N-terminus of the scFv, as described by Coloma, J. et al. (1997) Nature Biotech 15:159.

### Antibody-scFv Fusion

[0915] Antibody-scFv Fusions are bispecific antibodies comprising a traditional antibody and a scFv of unique specificity fused to the C terminus of the antibody heavy chain. The scFv can be fused to the C terminus through the Heavy Chain of the scFv either directly or through a linker peptide. Antibody fusions can be produced by (1) engineering the DNA sequence of the target fusion, and (2) transfecting the target DNA into a suitable host cell to express the fusion protein. It seems like the antibody-scFv fusion may be linked by a (Gly)-Ser linker between the C-terminus of the CH3 domain and the N-terminus of the scFv, as described by Coloma, J. et al. (1997) Nature Biotech 15:159.

### Variable Domain Immunoglobulin DVD

[0916] A related format is the dual variable domain immunoglobulin (DVD), which are composed of VH and VL domains of a second specificity place upon the N termini of the V domains by shorter linker sequences.

[0917] Other exemplary multispecific antibody formats include, e.g., those described in the following US20160114057A1, US20130243775A1, US20140051833, US20130022601, US20150017187A1, US20120201746A1, US20150133638A1, US20130266568A1, US20160145340A1, WO2015127158A1, US20150203591A1, US20140322221A1, US20130303396A1, US20110293613, US20130017200A1, US20160102135A1, WO2015197598A2, WO2015197582A1, U.S. Pat. No. 9,359,437, US20150018529, WO2016115274A1, WO2016087416A1, US20080069820A1, U.S. Pat. Nos. 9,145,588B, 7,919,257, and US20150232560A1. Exemplary multispecific molecules utilizing a full antibody-Fab/scFab format include those described in the following, U.S. Pat. No. 9,382,323B2, US20140072581A1, US20140308285A1, US20130165638A1, US20130267686A1, US20140377269A1, U.S. Pat. No. 7,741,446B2, and WO1995009917A1. Exemplary multispecific molecules utilizing a domain exchange format include those described in the following, US20150315296A1, WO2016087650A1, US20160075785A1, WO2016016299A1, US20160130347A1, US20150166670, U.S. Pat. No. 8,703,132B2, US20100316645, U.S. Pat. No. 8,227,577B2, US20130078249.

### Fc-Containing Entities (Mini-Antibodies)

[0918] Fc-containing entities, also known as mini-antibodies, can be generated by fusing scFv to the C-termini of constant heavy region domain 3 (CH3-scFv) and/or to the hinge region (scFv-hinge-Fc) of an antibody with a different specificity. Trivalent entities can also be made which have disulfide stabilized variable domains (without peptide linker) fused to the C-terminus of CH3 domains of IgGs.

### Fc-Containing Multispecific Molecules

[0919] In some embodiments, the multispecific molecules disclosed herein includes an immunoglobulin constant region (e.g., an Fc region). Exemplary Fc regions can be chosen from the heavy chain constant regions of IgG1, IgG2, IgG3 or IgG4; more particularly, the heavy chain constant region of human IgG1, IgG2, IgG3, or IgG4.

[0920] In some embodiments, the immunoglobulin chain constant region (e.g., the Fc region) is altered, e.g., mutated, to increase or decrease one or more of: Fc receptor binding, antibody glycosylation, the number of cysteine residues, effector cell function, or complement function.

[0921] In other embodiments, an interface of a first and second immunoglobulin chain constant regions (e.g., a first and a second Fc region) is altered, e.g., mutated, to increase or decrease dimerization, e.g., relative to a non-engineered interface, e.g., a naturally-occurring interface. For example, dimerization of the immunoglobulin chain constant region (e.g., the Fc region) can be enhanced by providing an Fc interface of a first and a second Fc region with one or more of: a paired protuberance-cavity (“knob-in-a hole”), an electrostatic interaction, or a strand-exchange, such that a greater ratio of heteromultimer to homomultimer forms, e.g., relative to a non-engineered interface.

[0922] In some embodiments, the multispecific molecules include a paired amino acid substitution at a position chosen from one or more of 347, 349, 350, 351, 366, 368, 370, 392, 394, 395, 397, 398, 399, 405, 407, or 409, e.g., of the Fc region of human IgG1 For example, the immunoglobulin chain constant region (e.g., Fc region) can include a paired an amino acid substitution chosen from: T366S, L368A, or Y407V (e.g., corresponding to a cavity or hole), and T366W (e.g., corresponding to a protuberance or knob).

[0923] In other embodiments, the multifunctional molecule includes a half-life extender, e.g., a human serum albumin or an antibody molecule to human serum albumin.

### Heterodimerized Antibody Molecules & Methods of Making

[0924] Various methods of producing multispecific antibodies have been disclosed to address the problem of incorrect heavy chain pairing. Exemplary methods are described below. Exemplary multispecific antibody formats and methods of making said multispecific antibodies are also disclosed in e.g., Speiss et al. Molecular Immunology 67 (2015) 95-106; and Klein et al mAbs 4:6, 653-663; November/December 2012; the entire contents of each of which are incorporated by reference herein.

[0925] Heterodimerized bispecific antibodies are based on the natural IgG structure, wherein the two binding arms recognize different antigens. IgG derived formats that enable defined monovalent (and simultaneous) antigen binding are generated by forced heavy chain heterodimerization, combined with technologies that minimize light chain mispairing (e.g., common light chain). Forced heavy chain heterodimerization can be obtained using, e.g., knob-in-hole OR strand exchange engineered domains (SEED).

### Knob-In-Hole

[0926] Knob-in-Hole as described in U.S. Pat. Nos. 5,731,116, 7,476,724 and Ridgway, J. et al. (1996) Prot. Engineering 9(7): 617-621, broadly involves: (1) mutating the CH3 domain of one or both antibodies to promote heterodimerization; and (2) combining the mutated antibodies under conditions that promote heterodimerization. “Knobs” or “protuberances” are typically created by replacing a small amino acid in a parental antibody with a larger amino acid (e.g., T366Y or T366W); “Holes” or “cavities” are created by replacing a larger residue in a parental antibody with a smaller amino acid (e.g., Y407T, T366S, L368A and/or Y407V).

[0927] For bispecific antibodies including an Fc domain, introduction of specific mutations into the constant region of the heavy chains to promote the correct heterodimerization of the Fc portion can be utilized. Several such techniques are reviewed in Klein et al. (mAbs (2012) 4:6, 1-11), the contents of which are incorporated herein by reference in their entirety. These techniques include the “knobs-into-holes” (KiH) approach which involves the introduction of a bulky residue into one of the CH3 domains of one of the antibody heavy chains. This bulky residue fits into a complementary “hole” in the other CH3 domain of the paired heavy chain so as to promote correct pairing of heavy chains (see e.g., U.S. Pat. No. 7,642,228).

[0928] Exemplary KiH mutations include S354C, T366W in the “knob” heavy chain and Y349C, T366S, L368A, Y407V in the “hole” heavy chain. Other exemplary KiH mutations are provided in Table 4, with additional optional stabilizing Fc cysteine mutations.

TABLE 4
Exemplary Fc KiH mutations and optional Cysteine mutations

| Position | Knob Mutation | Hole Mutation |
|---|---|---|
| T366 | T366W | T366S |
| L368 | — | L368A |
| Y407 | — | Y407V |

Additional Cysteine Mutations to form a stabilizing disulfide bridge

| Position | Knob CH3 | Hole CH3 |
|---|---|---|
| S354 | S354C | — |
| Y349 | — | Y349C |

[0929] Other Fc mutations are provided by Igawa and Tsunoda who identified 3 negatively charged residues in the CH3 domain of one chain that pair with three positively charged residues in the CH3 domain of the other chain. These specific charged residue pairs are: E356-K439, E357-K370, D399-K409 and vice versa. By introducing at least two of the following three mutations in chain A: E356K, E357K and D399K, as well as K370E, K409D, K439E in chain B, alone or in combination with newly identified disulfide bridges, they were able to favor very efficient heterodimerization while suppressing homodimerization at the same time (Martens T et al. A novel one-armed antic-Met antibody inhibits glioblastoma growth in vivo. Clin Cancer Res 2006; 12:6144-52; PMID: 17062691). Xencor defined 41 variant pairs based on combining structural calculations and sequence information that were subsequently screened for maximal heterodimerization, defining the combination of S364H, F405A (HA) on chain A and Y349T, T394F on chain B (TF) (Moore G L et al. A novel bispecific antibody format enables simultaneous bivalent and monovalent co-engagement of distinct target antigens. MAbs 2011; 3:546-57; PMID: 22123055).

[0930] Other exemplary Fc mutations to promote heterodimerization of multi specific antibodies include those described in the following references, the contents of each of which is incorporated by reference herein, WO2016071377A1, US20140079689A1, US20160194389A1, US20160257763, WO2016071376A2, WO2015107026A1, WO2015107025A1, WO2015107015A1, US20150353636A1, US20140199294A1, U.S. Pat. No. 7,750,128B2, US20160229915A1, US20150344570A1, U.S. Pat. No. 8,003,774A1, US20150337049A1, US20150175707A1, US20140242075A1, US20130195849A1, US20120149876A1, US20140200331A1, U.S. Pat. No. 9,309,311B2, U.S. Pat. No. 8,586,713, US20140037621A1, US20130178605A1, US20140363426A1, US20140051835A1 and US20110054151A1.

[0931] Stabilizing cysteine mutations have also been used in combination with KiH and other Fc heterodimerization promoting variants, see e.g., U.S. Pat. No. 7,183,076. Other exemplary cysteine modifications include, e.g., those disclosed in US20140348839A1, U.S. Pat. No. 7,855,275B2, and U.S. Pat. No. 9,000,130B2.

### Strand Exchange Engineered Domains (SEED)

[0932] Heterodimeric Fc platform that support the design of bispecific and asymmetric fusion proteins by devising strand-exchange engineered domain (SEED) C(H)3 heterodimers are known. These derivatives of human IgG and IgA C(H)3 domains create complementary human SEED C(H)3 heterodimers that are composed of alternating segments of human IgA and IgG C(H)3 sequences. The resulting pair of SEED C(H)3 domains preferentially associates to form heterodimers when expressed in mammalian cells. SEEDbody (Sb) fusion proteins consist of [IgG1 hinge]-C(H)2-[SEED C(H)3], that may be genetically linked to one or more fusion partners (see e.g., Davis J H et al. SEEDbodies: fusion proteins based on strand exchange engineered domain (SEED) CH3 heterodimers in an Fc analogue platform for asymmetric binders or immunofusions and bispecific antibodies. Protein Eng Des Sel 2010; 23:195-202; PMID:20299542 and U.S. Pat. No. 8,871,912. The contents of each of which are incorporated by reference herein).

[0933] Duobody

[0934] “Duobody” technology to produce bispecific antibodies with correct heavy chain pairing are known. The DuoBody technology involves three basic steps to generate stable bispecific human IgG1 antibodies in a post-production exchange reaction. In a first step, two IgG1s, each containing single matched mutations in the third constant (CH3) domain, are produced separately using standard mammalian recombinant cell lines. Subsequently, these IgG1 antibodies are purified according to standard processes for recovery and purification. After production and purification (post-production), the two antibodies are recombined under tailored laboratory conditions resulting in a bispecific antibody product with a very high yield (typically >95%) (see e.g., Labrijn et al, PNAS 2013; 110(13):5145-5150 and Labrijn et al. Nature Protocols 2014; 9(10):2450-63, the contents of each of which are incorporated by reference herein).

[0935] Electrostatic Interactions

[0936] Methods of making multispecific antibodies using CH3 amino acid changes with charged amino acids such that homodimer formation is electrostatically unfavorable are disclosed. EP1870459 and WO 2009089004 describe other strategies for favoring heterodimer formation upon co-expression of different antibody domains in a host cell. In these methods, one or more residues that make up the heavy chain constant domain 3 (CH3), CH3-CH3 interfaces in both CH3 domains are replaced with a charged amino acid such that homodimer formation is electrostatically unfavorable and heterodimerization is electrostatically favorable. Additional methods of making multispecific molecules using electrostatic interactions are described in the following references, the contents of each of which is incorporated by reference herein, include US20100015133, U.S. Pat. No. 8,592,562B2, U.S. Pat. No. 9,200,060B2, US20140154254A1, and U.S. Pat. No. 9,358,286A1.

[0937] Common Light Chain

[0938] Light chain mispairing needs to be avoided to generate homogenous preparations of bispecific IgGs. One way to achieve this is through the use of the common light chain principle, i.e. combining two binders that share one light chain but still have separate specificities. An exemplary method of enhancing the formation of a desired bispecific antibody from a mixture of monomers is by providing a common variable light chain to interact with each of the heteromeric variable heavy chain regions of the bispecific antibody. Compositions and methods of producing bispecific antibodies with a common light chain as disclosed in, e.g., U.S. Pat. No. 7,183,076B2, US20110177073A1, EP2847231A1, WO2016079081A1, and EP3055329A1, the contents of each of which is incorporated by reference herein.

[0939] CrossMab

[0940] Another option to reduce light chain mispairing is the CrossMab technology which avoids non-specific L chain mispairing by exchanging CH1 and CL domains in the Fab of one half of the bispecific antibody. Such crossover variants retain binding specificity and affinity, but make the two arms so different that L chain mispairing is prevented. The CrossMab technology (as reviewed in Klein et al. Supra) involves domain swapping between heavy and light chains so as to promote the formation of the correct pairings. Briefly, to construct a bispecific IgG-like CrossMab antibody that could bind to two antigens by using two distinct light chain—heavy chain pairs, a two-step modification process is applied. First, a dimerization interface is engineered into the C-terminus of each heavy chain using a heterodimerization approach, e.g., Knob-into-hole (KiH) technology, to ensure that only a heterodimer of two distinct heavy chains from one antibody (e.g., Antibody A) and a second antibody (e.g., Antibody B) is efficiently formed. Next, the constant heavy 1 (CH1) and constant light (CL) domains of one antibody are exchanged (Antibody A), keeping the variable heavy (VH) and variable light (VL) domains consistent. The exchange of the CH1 and CL domains ensured that the modified antibody (Antibody A) light chain would only efficiently dimerize with the modified antibody (antibody A) heavy chain, while the unmodified antibody (Antibody B) light chain would only efficiently dimerize with the unmodified antibody (Antibody B) heavy chain; and thus only the desired bispecific CrossMab would be efficiently formed (see e.g., Cain, C. SciBX 4(28); doi:10.1038/scibx.2011.783, the contents of which are incorporated by reference herein).

[0941] Common Heavy Chain

[0942] An exemplary method of enhancing the formation of a desired bispecific antibody from a mixture of monomers is by providing a common variable heavy chain to interact with each of the heteromeric variable light chain regions of the bispecific antibody. Compositions and methods of producing bispecific antibodies with a common heavy chain are disclosed in, e.g., US20120184716, US20130317200, and US20160264685A1, the contents of each of which is incorporated by reference herein.

[0943] Amino Acid Modifications

[0944] Alternative compositions and methods of producing multispecific antibodies with correct light chain pairing include various amino acid modifications. For example, Zymeworks describes heterodimers with one or more amino acid modifications in the CH1 and/or CL domains, one or more amino acid modifications in the VH and/or VL domains, or a combination thereof, which are part of the interface between the light chain and heavy chain and create preferential pairing between each heavy chain and a desired light chain such that when the two heavy chains and two light chains of the heterodimer pair are co-expressed in a cell, the heavy chain of the first heterodimer preferentially pairs with one of the light chains rather than the other (see e.g., WO2015181805). Other exemplary methods are described in WO2016026943 (Argen-X), US20150211001, US20140072581A1, US20160039947A1, and US20150368352.

[0945] Lambda/Kappa Formats

[0946] Multispecific molecules (e.g., multispecific antibody molecules) that include the lambda light chain polypeptide and a kappa light chain polypeptides, can be used to allow for heterodimerization. Methods for generating bispecific antibody molecules comprising the lambda light chain polypeptide and a kappa light chain polypeptides are disclosed in PCT/US17/53053 filed on Sep. 22, 2017 and designated publication number WO 2018/057955, incorporated herein by reference in its entirety.

[0947] In embodiments, the multispecific molecule includes a multispecific antibody molecule, e.g., an antibody molecule comprising two binding specificities, e.g., a bispecific antibody molecule. The multispecific antibody molecule includes:

[0948] a lambda light chain polypeptide 1 (LLCP1) specific for a first epitope;

[0949] a heavy chain polypeptide 1 (HCP1) specific for the first epitope;

[0950] a kappa light chain polypeptide 2 (KLCP2) specific for a second epitope; and a heavy chain polypeptide 2 (HCP2) specific for the second epitope.

[0951] “Lambda light chain polypeptide 1 (LLCP1)”, as that term is used herein, refers to a polypeptide comprising sufficient light chain (LC) sequence, such that when combined with a cognate heavy chain variable region, can mediate specific binding to its epitope and complex with an HCP1. In an embodiment it comprises all or a fragment of a CH1 region. In an embodiment, an LLCP1 comprises LC-CDR1, LC-CDR2, LC-CDR3, FR1, FR2, FR3, FR4, and CH1, or sufficient sequence therefrom to mediate specific binding of its epitope and complex with an HCP1. LLCP1, together with its HCP1, provide specificity for a first epitope (while KLCP2, together with its HCP2, provide specificity for a second epitope). As described elsewhere herein, LLCP1 has a higher affinity for HCP1 than for HCP2.

[0952] “Kappa light chain polypeptide 2 (KLCP2)”, as that term is used herein, refers to a polypeptide comprising sufficient light chain (LC) sequence, such that when combined with a cognate heavy chain variable region, can mediate specific binding to its epitope and complex with an HCP2. In some embodiments, it comprises all or a fragment of a CH1 region. In an embodiment, a KLCP2 comprises LC-CDR1, LC-CDR2, LC-CDR3, FR1, FR2, FR3, FR4, and CH1, or sufficient sequence therefrom to mediate specific binding of its epitope and complex with an HCP2. KLCP2, together with its HCP2, provide specificity for a second epitope (while LLCP1, together with its HCP1, provide specificity for a first epitope).

[0953] “Heavy chain polypeptide 1 (HCP1)”, as that term is used herein, refers to a polypeptide comprising sufficient heavy chain (HC) sequence, e.g., HC variable region sequence, such that when combined with a cognate LLCP1, can mediate specific binding to its epitope and complex with an HCP1. In some embodiments, it comprises all or a fragment of a CH1 region. In an embodiment, it comprises all or a fragment of a CH2 and/or CH3 region. In an embodiment an HCP1 comprises HC-CDR1, HC-CDR2, HC-CDR3, FR1, FR2, FR3, FR4, CH1, CH2, and CH3, or sufficient sequence therefrom to: (i) mediate specific binding of its epitope and complex with an LLCP1, (ii) to complex preferentially, as described herein to LLCP1 as opposed to KLCP2; and (iii) to complex preferentially, as described herein, to an HCP2, as opposed to another molecule of HCP1. HCP1, together with its LLCP1, provide specificity for a first epitope (while KLCP2, together with its HCP2, provide specificity for a second epitope).

[0954] “Heavy chain polypeptide 2 (HCP2)”, as that term is used herein, refers to a polypeptide comprising sufficient heavy chain (HC) sequence, e.g., HC variable region sequence, such that when combined with a cognate LLCP1, can mediate specific binding to its epitope and complex with an HCP1. In some embodiments, it comprises all or a fragment of a CH1 region. In some embodiments, it comprises all or a fragment of a CH2 and/or CH3 region. In an embodiment an HCP1 comprises HC-CDR1, HC-CDR2, HC-CDR3, FR1, FR2, FR3, FR4, CH1, CH2, and CH3, or sufficient sequence therefrom to: (i) mediate specific binding of its epitope and complex with an KLCP2, (ii) to complex preferentially, as described herein to KLCP2 as opposed to LLCP1; and (iii) to complex preferentially, as described herein, to an HCP1, as opposed to another molecule of HCP2. HCP2, together with its KLCP2, provide specificity for a second epitope (while LLCP1, together with its HCP1, provide specificity for a first epitope).

[0955] In some embodiments of the multispecific antibody molecule disclosed herein:

[0956] LLCP1 has a higher affinity for HCP1 than for HCP2; and/or

[0957] KLCP2 has a higher affinity for HCP2 than for HCP1.

[0958] In embodiments, the affinity of LLCP1 for HCP1 is sufficiently greater than its affinity for HCP2, such that under preselected conditions, e.g., in aqueous buffer, e.g., at pH 7, in saline, e.g., at pH 7, or under physiological conditions, at least 75, 80, 90, 95, 98, 99, 99.5, or 99.9% of the multispecific antibody molecule molecules have a LLCP1 complexed, or interfaced with, a HCP1.

[0959] In some embodiments of the multispecific antibody molecule disclosed herein: the HCP1 has a greater affinity for HCP2, than for a second molecule of HCP1; and/or the HCP2 has a greater affinity for HCP1, than for a second molecule of HCP2.

[0960] In embodiments, the affinity of HCP1 for HCP2 is sufficiently greater than its affinity for a second molecule of HCP1, such that under preselected conditions, e.g., in aqueous buffer, e.g., at pH 7, in saline, e.g., at pH 7, or under physiological conditions, at least 75%, 80, 90, 95, 98, 99 99.5 or 99.9% of the multispecific antibody molecule molecules have a HCP1 complexed, or interfaced with, a HCP2.

[0961] In another aspect, disclosed herein is a method for making, or producing, a multispecific antibody molecule. The method includes:

[0962] (i) providing a first heavy chain polypeptide (e.g., a heavy chain polypeptide comprising one, two, three or all of a first heavy chain variable region (first VH), a first CH1, a first heavy chain constant region (e.g., a first CH2, a first CH3, or both));

[0963] (ii) providing a second heavy chain polypeptide (e.g., a heavy chain polypeptide comprising one, two, three or all of a second heavy chain variable region (second VH), a second CH1, a second heavy chain constant region (e.g., a second CH2, a second CH3, or both));

[0964] (iii) providing a lambda chain polypeptide (e.g., a lambda light variable region (VL□), a lambda light constant chain (VL□), or both) that preferentially associates with the first heavy chain polypeptide (e.g., the first VH); and

[0965] (iv) providing a kappa chain polypeptide (e.g., a lambda light variable region (VL□), a lambda light constant chain (VL□), or both) that preferentially associates with the second heavy chain polypeptide (e.g., the second VH), under conditions where (i)-(iv) associate.

[0966] In embodiments, the first and second heavy chain polypeptides form an Fc interface that enhances heterodimerization.

[0967] In embodiments, (i)-(iv) (e.g., nucleic acid encoding (i)-(iv)) are introduced in a single cell, e.g., a single mammalian cell, e.g., a CHO cell. In embodiments, (i)-(iv) are expressed in the cell.

[0968] In embodiments, (i)-(iv) (e.g., nucleic acid encoding (i)-(iv)) are introduced in different cells, e.g., different mammalian cells, e.g., two or more CHO cell. In embodiments, (i)-(iv) are expressed in the cells.

[0969] In embodiments, the method further comprises purifying a cell-expressed antibody molecule, e.g., using a lambda- and/or- kappa-specific purification, e.g., affinity chromatography.

[0970] In embodiments, the method further comprises evaluating the cell-expressed multispecific antibody molecule. For example, the purified cell-expressed multispecific antibody molecule can be analyzed by techniques known in the art, include mass spectrometry. In one embodiment, the purified cell-expressed antibody molecule is cleaved, e.g., digested with papain to yield the Fab moieties and evaluated using mass spectrometry.

[0971] In embodiments, the method produces correctly paired kappa/lambda multispecific, e.g., bispecific, antibody molecules in a high yield, e.g., at least 75%, 80, 90, 95, 98, 99 99.5 or 99.9%.

[0972] In other embodiments, the multispecific, e.g., a bispecific, antibody molecule that includes:

[0973] (i) a first heavy chain polypeptide (HCP1) (e.g., a heavy chain polypeptide comprising one, two, three or all of a first heavy chain variable region (first VH), a first CH1, a first heavy chain constant region (e.g., a first CH2, a first CH3, or both)), e.g., wherein the HCP1 binds to a first epitope;

[0974] (ii) a second heavy chain polypeptide (HCP2) (e.g., a heavy chain polypeptide comprising one, two, three or all of a second heavy chain variable region (second VH), a second CH1, a second heavy chain constant region (e.g., a second CH2, a second CH3, or both)), e.g., wherein the HCP2 binds to a second epitope;

[0975] (iii) a lambda light chain polypeptide (LLCP1) (e.g., a lambda light variable region (VL1), a lambda light constant chain (VL1), or both) that preferentially associates with the first heavy chain polypeptide (e.g., the first VH), e.g., wherein the LLCP1 binds to a first epitope; and

[0976] (iv) a kappa light chain polypeptide (KLCP2) (e.g., a lambda light variable region (VLk), a lambda light constant chain (VLk), or both) that preferentially associates with the second heavy chain polypeptide (e.g., the second VH), e.g., wherein the KLCP2 binds to a second epitope.

[0977] In embodiments, the first and second heavy chain polypeptides form an Fc interface that enhances heterodimerization. In embodiments, the multispecific antibody molecule has a first binding specificity that includes a hybrid VL1-CL1 heterodimerized to a first heavy chain variable region connected to the Fc constant, CH2-CH3 domain (having a knob modification) and a second binding specificity that includes a hybrid VLk-CLk heterodimerized to a second heavy chain variable region connected to the Fc constant, CH2-CH3 domain (having a hole modification).

### Cytokine Molecules

[0978] Cytokines are generally polypeptides that influence cellular activity, for example, through signal transduction pathways. Accordingly, a cytokine of the multispecific or multifunctional polypeptide is useful and can be associated with receptor-mediated signaling that transmits a signal from outside the cell membrane to modulate a response within the cell. Cytokines are proteinaceous signaling compounds that are mediators of the immune response. They control many different cellular functions including proliferation, differentiation and cell survival/apoptosis; cytokines are also involved in several pathophysiological processes including viral infections and autoimmune diseases. Cytokines are synthesized under various stimuli by a variety of cells of both the innate (monocytes, macrophages, dendritic cells) and adaptive (T- and B-cells) immune systems. Cytokines can be classified into two groups: pro- and anti-inflammatory. Pro-inflammatory cytokines, including IFNγ, IL-1, IL-6 and TNF-alpha, are predominantly derived from the innate immune cells and Th1 cells. Anti-inflammatory cytokines, including IL-10, IL-4, IL-13 and IL-5, are synthesized from Th2 immune cells.

[0979] The present disclosure provides, inter alia, multispecific (e.g., bi-, tri-, quad-specific) or multifunctional molecules, that include, e.g., are engineered to contain, one or more cytokine molecules, e.g., immunomodulatory (e.g., proinflammatory) cytokines and variants, e.g., functional variants, thereof. Accordingly, in some embodiments, the cytokine molecule is an interleukin or a variant, e.g., a functional variant thereof. In some embodiments the interleukin is a proinflammatory interleukin. In some embodiments the interleukin is chosen from interleukin-2 (IL-2), interleukin-12 (IL-12), interleukin-15 (IL-15), interleukin-18 (IL-18), interleukin-21 (IL-21), interleukin-7 (IL-7), or interferon gamma. In some embodiments, the cytokine molecule is a proinflammatory cytokine.

[0980] In certain embodiments, the cytokine is a single chain cytokine. In certain embodiments, the cytokine is a multichain cytokine (e.g., the cytokine comprises 2 or more (e.g., 2) polypeptide chains. An exemplary multichain cytokine is IL-12.

[0981] Examples of useful cytokines include, but are not limited to, GM-CSF, IL-1α, IL-1β, IL-2, IL-3, IL-4, IL-5, IL-6, IL-7, IL-8, IL-10, IL-12, IL-21, IFN-α, IFN-γ, MIP-1α, TGF-β, TNF-α, and TNFβ. In one embodiment the cytokine of the multispecific or multifunctional polypeptide is a cytokine selected from the group of GM-CSF, IL-2, IL-7, IL-8, IL-10, IL-12, IL-15, IL-21, IFN-α, IFN-γ, MIP-1α, MIP-1β and TGF-β. In one embodiment the cytokine of the i the multispecific or multifunctional polypeptide is a cytokine selected from the group of IL-2, IL-7, IL-10, IL-12, IL-15, IFN-α, and IFN-γ. In certain embodiments the cytokine is mutated to remove N- and/or O-glycosylation sites. Elimination of glycosylation increases homogeneity of the product obtainable in recombinant production.

[0982] In one embodiment, the cytokine of the multispecific or multifunctional polypeptide is IL-2. In a specific embodiment, the IL-2 cytokine can elicit one or more of the cellular responses selected from the group consisting of: proliferation in an activated T lymphocyte cell, differentiation in an activated T lymphocyte cell, cytotoxic T cell (CTL) activity, proliferation in an activated B cell, differentiation in an activated B cell, proliferation in a natural killer (NK) cell, differentiation in a NK cell, cytokine secretion by an activated T cell or an NK cell, and NK/lymphocyte activated killer (LAK) antitumor cytotoxicity. In another particular embodiment the IL-2 cytokine is a mutant IL-2 cytokine having reduced binding affinity to the .alpha.-subunit of the IL-2 receptor. Together with the .beta.- and .gamma.-subunits (also known as CD122 and CD132, respectively), the .alpha.-subunit (also known as CD25) forms the heterotrimeric high-affinity IL-2 receptor, while the dimeric receptor consisting only of the β- and γ-subunits is termed the intermediate-affinity IL-2 receptor. As described in PCT patent application number PCT/EP2012/051991, which is incorporated herein by reference in its entirety, a mutant IL-2 polypeptide with reduced binding to the .alpha.-subunit of the IL-2 receptor has a reduced ability to induce IL-2 signaling in regulatory T cells, induces less activation-induced cell death (AICD) in T cells, and has a reduced toxicity profile in vivo, compared to a wild-type IL-2 polypeptide. The use of such an cytokine with reduced toxicity is particularly advantageous in a multispecific or multifunctional polypeptide according to the invention, having a long serum half-life due to the presence of an Fc domain. In one embodiment, the mutant IL-2 cytokine of the multispecific or multifunctional polypeptide according to the invention comprises at least one amino acid mutation that reduces or abolishes the affinity of the mutant IL-2 cytokine to the .alpha.-subunit of the IL-2 receptor (CD25) but preserves the affinity of the mutant IL-2 cytokine to the intermediate-affinity IL-2 receptor (consisting of the β and γ subunits of the IL-2 receptor), compared to the non-mutated IL-2 cytokine. In one embodiment the one or more amino acid mutations are amino acid substitutions. In a specific embodiment, the mutant IL-2 cytokine comprises one, two or three amino acid substitutions at one, two or three position(s) selected from the positions corresponding to residue 42, 45, and 72 of human IL-2. In a more specific embodiment, the mutant IL-2 cytokine comprises three amino acid substitutions at the positions corresponding to residue 42, 45 and 72 of human IL-2. In an even more specific embodiment, the mutant IL-2 cytokine is human IL-2 comprising the amino acid substitutions F42A, Y45A and L72G. In one embodiment the mutant IL-2 cytokine additionally comprises an amino acid mutation at a position corresponding to position 3 of human IL-2, which eliminates the O-glycosylation site of IL-2. Particularly, said additional amino acid mutation is an amino acid substitution replacing a threonine residue by an alanine residue. A particular mutant IL-2 cytokine useful in the invention comprises four amino acid substitutions at positions corresponding to residues 3, 42, 45 and 72 of human IL-2. Specific amino acid substitutions are T3A, F42A, Y45A and L72G. As demonstrated in PCT patent application number PCT/EP2012/051991 and in the appended Examples, said quadruple mutant IL-2 polypeptide (IL-2 qm) exhibits no detectable binding to CD25, reduced ability to induce apoptosis in T cells, reduced ability to induce IL-2 signaling in T.sub.reg cells, and a reduced toxicity profile in vivo. However, it retains ability to activate IL-2 signaling in effector cells, to induce proliferation of effector cells, and to generate IFN-γ as a secondary cytokine by NK cells.

[0983] The IL-2 or mutant IL-2 cytokine according to any of the above embodiments may comprise additional mutations that provide further advantages such as increased expression or stability. For example, the cysteine at position 125 may be replaced with a neutral amino acid such as alanine, to avoid the formation of disulfide-bridged IL-2 dimers. Thus, in certain embodiments the IL-2 or mutant IL-2 cytokine of the multispecific or multifunctional polypeptide according to the invention comprises an additional amino acid mutation at a position corresponding to residue 125 of human IL-2. In one embodiment said additional amino acid mutation is the amino acid substitution C125A.

[0984] In a specific embodiment the IL-2 cytokine of the multispecific or multifunctional polypeptide comprises the polypeptide sequence of SEQ ID NO: 2270 [APTSSSTKKTQLQLEHLLLDLQMILNGINNYKNPKLTRMLTFKFYMPKKATELKHLQCLE EELKPLEEVLNLAQSKNFHLRPRDLISNINVIVLELKGSETTFMCEYADETATIVEFLNRWIT FAQSIISTLT].

[0985] In another specific embodiment the IL-2 cytokine of the multispecific or multifunctional polypeptide comprises the polypeptide sequence of SEQ ID NO: 2280 [APASSSTKKTQLQLEHLLLDLQMILNGINNYKNPKLTRMLTAKFAMPKKATELKHLQCLE EELKPLEEVLNGAQSKNFHLRPRDLISNINVIVLELKGSETTFMCEYADETATIVEFLNRWIT FAQSITSTLT]

[0986] In another embodiment the cytokine of the multispecific or multifunctional polypeptide is IL-12. In a specific embodiment said IL-12 cytokine is a single chain IL-12 cytokine. In an even more specific embodiment the single chain IL-12 cytokine comprises the polypeptide sequence of SEQ ID NO: 2290 [IWELKKDVYVVELDWYPDAPGEMVVLTCDTPEEDGITWTLDQSSEVLGSGKTLTIQVKEF GDAGQYTCHKGGEVLSHSLLLLHKKEDGIWSTDILKDQKEPKNKTFLRCEAKNYSGRFTC WWLTTISTDLTFSVKSSRGSSDPQGVTCGAATLSAERVRGDNKEYEYSVECQEDSACPAAE ESLPIEVMVDAVHKLKYENYTSSFFIRDIIKPDPPKNLQLKPLKNSRQVEVSWEYPDTWSTP HSYFSLTFCVQVQGKSKREKKDRVFTDKTSATVICRKNASISVRAQDRYYSSSWSEWASVP CSGGGGSGGGGSGGGGSRNLPVATPDPGMFPCLUESQNLLRAVSNMLQKARQTLEFYPCT SEEIDHEDITKDKTSTVEACLPLELTKNESCLNSRETSFITNGSCLASRKTSFMMALCLSSIYE DLKMYQVEFKTMNAKLLMDPKRQIFLDQNMLAVIDELMQALNFNSETVPQKSSLEEPDFY KTKIKLCILLHAFRIRAVTIDRVMSYLNAS]. In one embodiment, the IL-12 cytokine can elicit one or more of the cellular responses selected from the group consisting of: proliferation in a NK cell, differentiation in a NK cell, proliferation in a T cell, and differentiation in a T cell.

[0987] In another embodiment the cytokine of the multispecific or multifunctional polypeptide is IL-10. In a specific embodiment said IL-10 cytokine is a single chain IL-10 cytokine. In an even more specific embodiment the single chain IL-10 cytokine comprises the polypeptide sequence of

SEQ ID NO: 2300
[SPGQGTQSENSCTHFPGNLPNMLRDLRDAFSRVK
TFFQMKDQLDNLLLKESLLEDFKGYLGCQALSEM
IQFYLEEVMPQAENQDPDIKAHVNSLGENLKTLRL
RLRRCHRFLPCENKSKAVEQVKNAFNKLQEKGIYK
AMSEFDIFINYIEAYMTMKIRNGGGGSGGGGSGGG
GSGGGGSSPGQGTQSENSCTHFPGNLPNMLRDLRD
AFSRVKTFFQMKDQLDNLLLKESLLEDFKGYLGCQ
ALSEMIQFYLEEVMPQAENQDPDIKAHVNSLGENL
KTLRLRLRRCHRFLPCENKSKAVEQVKNAFNKLQE
KGIYKAMSEFDIFINYIEAYMTMKIRN].

[0988] In another specific embodiment the IL-10 cytokine is a monomeric IL-10 cytokine. In a more specific embodiment the monomeric IL-10 cytokine comprises the polypeptide sequence of SEQ ID NO: 2310 [SPGQGTQSENSCTHFPGNLPNMLRDLRDAFSRVKTFFQMKDQLDNLLLKESLLEDFKGYL GCQALSEMIQFYLEEVMPQAENQDPDIKAHVNSLGENLKTLRLRLRRCHRFLPCENGGGSG GKSKAVEQVKNAFNKLQEKGIYKAMSEFDIFINYIEAYMTMKIRN]. In one embodiment, the IL-10 cytokine can elicit one or more of the cellular responses selected from the group consisting of: inhibition of cytokine secretion, inhibition of antigen presentation by antigen presenting cells, reduction of oxygen radical release, and inhibition of T cell proliferation. A multispecific or multifunctional polypeptide according to the invention wherein the cytokine is IL-10 is particularly useful for downregulation of inflammation, e.g. in the treatment of an inflammatory disorder.

[0989] In another embodiment, the cytokine of the multispecific or multifunctional polypeptide is IL-15. In a specific embodiment said IL-15 cytokine is a mutant IL-15 cytokine having reduced binding affinity to the α-subunit of the IL-15 receptor. Without wishing to be bound by theory, a mutant IL-15 polypeptide with reduced binding to the .alpha.-subunit of the IL-15 receptor has a reduced ability to bind to fibroblasts throughout the body, resulting in improved pharmacokinetics and toxicity profile, compared to a wild-type IL-15 polypeptide. The use of an cytokine with reduced toxicity, such as the described mutant IL-2 and mutant IL-15 effector moieties, is particularly advantageous in a multispecific or multifunctional polypeptide according to the invention, having a long serum half-life due to the presence of an Fc domain. In one embodiment the mutant IL-15 cytokine of the multispecific or multifunctional polypeptide according to the invention comprises at least one amino acid mutation that reduces or abolishes the affinity of the mutant IL-15 cytokine to the .alpha.-subunit of the IL-15 receptor but preserves the affinity of the mutant IL-15 cytokine to the intermediate-affinity IL-15/IL-2 receptor (consisting of the .beta.- and .gamma.-subunits of the IL-15/IL-2 receptor), compared to the non-mutated IL-15 cytokine. In one embodiment the amino acid mutation is an amino acid substitution. In a specific embodiment, the mutant IL-15 cytokine comprises an amino acid substitution at the position corresponding to residue 53 of human IL-15. In a more specific embodiment, the mutant IL-15 cytokine is human IL-15 comprising the amino acid substitution E53A. In one embodiment the mutant IL-15 cytokine additionally comprises an amino acid mutation at a position corresponding to position 79 of human IL-15, which eliminates the N-glycosylation site of IL-15. Particularly, said additional amino acid mutation is an amino acid substitution replacing an asparagine residue by an alanine residue. In an even more specific embodiment the IL-15 cytokine comprises the polypeptide sequence of SEQ ID NO: 2320 [NWVNVISDLKKIEDLIQSIVIIIIDATLYTESDVHPSCKVTAMKCFLLELQVISLASGDASIHDT VENLIILANNSLSSNGAVTESGCKECEELEEKNIKEFLQSFVHIVQMFINTS]. In one embodiment, the IL-15 cytokine can elicit one or more of the cellular responses selected from the group consisting of: proliferation in an activated T lymphocyte cell, differentiation in an activated T lymphocyte cell, cytotoxic T cell (CTL) activity, proliferation in an activated B cell, differentiation in an activated B cell, proliferation in a natural killer (NK) cell, differentiation in a NK cell, cytokine secretion by an activated T cell or an NK cell, and NK/lymphocyte activated killer (LAK) antitumor cytotoxicity.

[0990] Mutant cytokine molecules useful as effector moieties in the multispecific or multifunctional polypeptide can be prepared by deletion, substitution, insertion or modification using genetic or chemical methods well known in the art. Genetic methods may include site-specific mutagenesis of the encoding DNA sequence, PCR, gene synthesis, and the like. The correct nucleotide changes can be verified for example by sequencing. Substitution or insertion may involve natural as well as non-natural amino acid residues. Amino acid modification includes well known methods of chemical modification such as the addition or removal of glycosylation sites or carbohydrate attachments, and the like.

[0991] In one embodiment, the cytokine, particularly a single-chain cytokine, of the multispecific or multifunctional polypeptide is GM-CSF. In a specific embodiment, the GM-CSF cytokine can elicit proliferation and/or differentiation in a granulocyte, a monocyte or a dendritic cell. In one embodiment, the cytokine, particularly a single-chain cytokine, of the multispecific or multifunctional polypeptide is IFN-α. In a specific embodiment, the IFN-α cytokine can elicit one or more of the cellular responses selected from the group consisting of: inhibiting viral replication in a virus-infected cell, and upregulating the expression of major histocompatibility complex I (MEW I). In another specific embodiment, the IFN-α cytokine can inhibit proliferation in a tumor cell. In one embodiment the cytokine, particularly a single-chain cytokine, of the multispecific or multifunctional polypeptide is IFNγ. In a specific embodiment, the IFN-γ cytokine can elicit one or more of the cellular responses selected from the group of: increased macrophage activity, increased expression of MEW molecules, and increased NK cell activity. In one embodiment the cytokine, particularly a single-chain cytokine, of the multispecific or multifunctional polypeptide is IL-7. In a specific embodiment, the IL-7 cytokine can elicit proliferation of T and/or B lymphocytes. In one embodiment, the cytokine, particularly a single-chain cytokine, of the multispecific or multifunctional polypeptide is IL-8. In a specific embodiment, the IL-8 cytokine can elicit chemotaxis in neutrophils. In one embodiment, the cytokine, particularly a single-chain cytokine, of the multispecific or multifunctional polypeptide, is MIP-1a. In a specific embodiment, the MIP-1α cytokine can elicit chemotaxis in monocytes and T lymphocyte cells. In one embodiment, the cytokine, particularly a single-chain cytokine, of the multispecific or multifunctional polypeptide is MIP-1β. In a specific embodiment, the MIP-1β cytokine can elicit chemotaxis in monocytes and T lymphocyte cells. In one embodiment, the cytokine, particularly a single-chain cytokine, of the multispecific or multifunctional polypeptide is TGF-β. In a specific embodiment, the TGF-β cytokine can elicit one or more of the cellular responses selected from the group consisting of: chemotaxis in monocytes, chemotaxis in macrophages, upregulation of IL-1 expression in activated macrophages, and upregulation of IgA expression in activated B cells.

[0992] In one embodiment, the multispecific or multifunctional polypeptide of the invention binds to an cytokine receptor with a dissociation constant (KD) that is at least about 1, 1.5, 2, 2.5, 3, 3.5, 4, 4.5, 5, 5.5, 6, 6.5, 7, 7.5, 8, 8.5, 9, 9.5 or 10 times greater than that for a control cytokine. In another embodiment, the multispecific or multifunctional polypeptide binds to an cytokine receptor with a KD that is at least 2, 3, 4, 5, 6, 7, 8, 9, or 10 times greater than that for a corresponding multispecific or multifunctional polypeptide comprising two or more effector moieties. In another embodiment, the multispecific or multifunctional polypeptide binds to an cytokine receptor with a dissociation constant KD that is about 10 times greater than that for a corresponding the multispecific or multifunctional polypeptide comprising two or more cytokines.

[0993] In some embodiments, the multispecific molecules disclosed herein include a cytokine molecule. In embodiments, the cytokine molecule includes a full length, a fragment or a variant of a cytokine; a cytokine receptor domain, e.g., a cytokine receptor dimerizing domain; or an agonist of a cytokine receptor, e.g., an antibody molecule (e.g., an agonistic antibody) to a cytokine receptor.

[0994] In some embodiments the cytokine molecule is chosen from IL-2, IL-12, IL-15, IL-18, IL-7, IL-21, or interferon gamma, or a fragment or variant thereof, or a combination of any of the aforesaid cytokines. The cytokine molecule can be a monomer or a dimer. In embodiments, the cytokine molecule can further include a cytokine receptor dimerizing domain.

[0995] In other embodiments, the cytokine molecule is an agonist of a cytokine receptor, e.g., an antibody molecule (e.g., an agonistic antibody) to a cytokine receptor chosen from an IL-15Ra or IL-21R.

[0996] In one embodiment, the cytokine molecule is IL-15, e.g., human IL-15 (e.g., comprising the amino acid sequence: NWVNVISDLKKIEDLIQSMHIDATLYTESDVHPSCKVTAMKCFLLELQVISLESGDASIHDT VENLIILANNSLSSNGNVTESGCKECEELEEKNIKEFLQSFVHIVQMFINTS (SEQ ID NO: 2170), a fragment thereof, or an amino acid sequence substantially identical thereto (e.g., 95% to 99.9% identical thereto, or having at least one amino acid alteration, but not more than five, ten or fifteen alterations (e.g., substitutions, deletions, or insertions, e.g., conservative substitutions) to the amino acid sequence of SEQ ID NO: 2170.

[0997] In some embodiments, the cytokine molecule comprises a receptor dimerizing domain, e.g., an IL15Ralpha dimerizing domain. In one embodiment, the IL15Ralpha dimerizing domain comprises the amino acid sequence: MAPRRARGCRTLGLPALLLLLLLRPPATRGITCPPPMSVEHADIWVKSYSLYSRERYICNSG FKRKAGTSSLTECVL (SEQ ID NO: 2180), a fragment thereof, or an amino acid sequence substantially identical thereto (e.g., 95% to 99.9% identical thereto, or having at least one amino acid alteration, but not more than five, ten or fifteen alterations (e.g., substitutions, deletions, or insertions, e.g., conservative substitutions) to the amino acid sequence of SEQ ID NO: 2180. In some embodiments, the cytokine molecule (e.g., IL-15) and the receptor dimerizing domain (e.g., an IL15Ralpha dimerizing domain) of the multispecific molecule are covalently linked, e.g., via a linker (e.g., a Gly-Ser linker, e.g., a linker comprising the amino acid sequence SGGSGGGGSGGGSGGGGSLQ (SEQ ID NO: 2190). In other embodiments, the cytokine molecule (e.g., IL-15) and the receptor dimerizing domain (e.g., an IL15Ralpha dimerizing domain) of the multispecific molecule are not covalently linked, e.g., are non-covalently associated.

[0998] In other embodiments, the cytokine molecule is IL-2, e.g., human IL-2 (e.g., comprising the amino acid sequence: APTSSSTKKTQLQLEHLLLDLQMILNGINNYKNPKLTRMLTFKFYMPKKATELKHLQCLEE ELKPLEEVLNLAQSKNFHLRPRDLISNINVIVLELKGSETTFMCEYADETATIVEFLNRWITF CQSIISTLT (SEQ ID NO: 2191), a fragment thereof, or an amino acid sequence substantially identical thereto (e.g., 95% to 99.9% identical thereto, or having at least one amino acid alteration, but not more than five, ten or fifteen alterations (e.g., substitutions, deletions, or insertions, e.g., conservative substitutions) to the amino acid sequence of SEQ ID NO:2191).

[0999] In other embodiments, the cytokine molecule is IL-18, e.g., human IL-18 (e.g., comprising the amino acid sequence: YFGKLESKLSVIRNLNDQVLFIDQGNRPLFEDMTDSDCRDNAPRTIFIISMYKDSQPRGMAV TISVKCEKISTLSCENKIISFKEMNPPDNIKDTKSDIIFFQRSVPGHDNKMQFESSSYEGYFLA CEKERDLFKLILKKEDELGDRSIMFTVQNED (SEQ ID NO: 2192), a fragment thereof, or an amino acid sequence substantially identical thereto (e.g., 95% to 99.9% identical thereto, or having at least one amino acid alteration, but not more than five, ten or fifteen alterations (e.g., substitutions, deletions, or insertions, e.g., conservative substitutions) to the amino acid sequence of SEQ ID NO: 2192).

[1000] In other embodiments, the cytokine molecule is IL-21, e.g., human IL-21 (e.g., comprising the amino acid sequence: QGQDRHMIRMRQLIDIVDQLKNYVNDLVPEFLPAPEDVETNCEWSAFSCFQKAQLKSANT GNNERIINVSIKKLKRKPPSTNAGRRQKHRLTCPSCDSYEKKPPKEFLERFKSLLQKMIHQH LSSRTHGSEDS (SEQ ID NO: 2193), a fragment thereof, or an amino acid sequence substantially identical thereto (e.g., 95% to 99.9% identical thereto, or having at least one amino acid alteration, but not more than five, ten or fifteen alterations (e.g., substitutions, deletions, or insertions, e.g., conservative substitutions) to the amino acid sequence of SEQ ID NO: 2193).

[1001] In yet other embodiments, the cytokine molecule is interferon gamma, e.g., human interferon gamma (e.g., comprising the amino acid sequence: QDPYVKEAENLKKYFNAGHSDVADNGTLFLGILKNWKEESDRKINIQSQIVSFYFKLFKNF KDDQSIQKSVETIKEDMNVKFFNSNKKKRDDFEKLTNYSVTDLNVQRKAIHELIQVMAELS PAAKTGKRKRSQMLFRG (SEQ ID NO: 2194), a fragment thereof, or an amino acid sequence substantially identical thereto (e.g., 95% to 99.9% identical thereto, or having at least one amino acid alteration, but not more than five, ten or fifteen alterations (e.g., substitutions, deletions, or insertions, e.g., conservative substitutions) to the amino acid sequence of SEQ ID NO: 2194).

### Immune Cell Engagers

[1002] The immune cell engagers, e.g., first and/or second immune cell engager, of the multispecific or multifunctional molecules disclosed herein can mediate binding to, and/or activation of, an immune cell, e.g., an immune effector cell. In some embodiments, the immune cell is chosen from a T cell, an NK cell, a B cell, a dendritic cell, or a macrophage cell engager, or a combination thereof. In some embodiments, the immune cell engager is chosen from one, two, three, or all of a T cell engager, NK cell engager, a B cell engager, a dendritic cell engager, or a macrophage cell engager, or a combination thereof. The immune cell engager can be an agonist of the immune system. In some embodiments, the immune cell engager can be an antibody molecule, a ligand molecule (e.g., a ligand that further comprises an immunoglobulin constant region, e.g., an Fc region), a small molecule, a nucleotide molecule.

### Natural Killer Cell Engagers

[1003] Natural Killer (NK) cells recognize and destroy tumors and virus-infected cells in an antibody-independent manner. The regulation of NK cells is mediated by activating and inhibiting receptors on the NK cell surface. One family of activating receptors is the natural cytotoxicity receptors (NCRs) which include NKp30, NKp44 and NKp46. The NCRs initiate tumor targeting by recognition of heparan sulfate on cancer cells. NKG2D is a receptor that provides both stimulatory and costimulatory innate immune responses on activated killer (NK) cells, leading to cytotoxic activity. DNAM1 is a receptor involved in intercellular adhesion, lymphocyte signaling, cytotoxicity and lymphokine secretion mediated by cytotoxic T-lymphocyte (CTL) and NK cell. DAP10 (also known as HCST) is a transmembrane adapter protein which associates with KLRK1 to form an activation receptor KLRK1-HCST in lymphoid and myeloid cells; this receptor plays a major role in triggering cytotoxicity against target cells expressing cell surface ligands such as MEW class I chain-related MICA and MICB, and U (optionally L1)6-binding proteins (ULBPs); it KLRK1-HCST receptor plays a role in immune surveillance against tumors and is required for cytolysis of tumors cells; indeed, melanoma cells that do not express KLRK1 ligands escape from immune surveillance mediated by NK cells. CD16 is a receptor for the Fc region of IgG, which binds complexed or aggregated IgG and also monomeric IgG and thereby mediates antibody-dependent cellular cytotoxicity (ADCC) and other antibody-dependent responses, such as phagocytosis.

[1004] In some embodiments, the NK cell engager is a viral hemagglutinin (HA), HA is a glycoprotein found on the surface of influenza viruses. It is responsible for binding the virus to cells with sialic acid on the membranes, such as cells in the upper respiratory tract or erythrocytes. HA has at least 18 different antigens. These subtypes are named H1 through H18. NCRs can recognize viral proteins. NKp46 has been shown to be able to interact with the HA of influenza and the HA-NA of Paramyxovirus, including Sendai virus and Newcastle disease virus. Besides NKp46, NKp44 can also functionally interact with HA of different influenza subtypes.

[1005] The present disclosure provides, inter alia, multispecific (e.g., bi-, tri-, quad-specific) or multifunctional molecules, that are engineered to contain one or more NK cell engagers that mediate binding to and/or activation of an NK cell. Accordingly, in some embodiments, the NK cell engager is selected from an antigen binding domain or ligand that binds to (e.g., activates): NKp30, NKp40, NKp44, NKp46, NKG2D, DNAM1, DAP10, CD16 (e.g., CD16a, CD16b, or both), CRTAM, CD27, PSGL1, CD96, CD100 (SEMA4D), NKp80, CD244 (also known as SLAMF4 or 2B4), SLAMF6, SLAMF7, KIR2DS2, KIR2DS4, KIR3DS1, KIR2DS3, KIR2DS5, KIR2DS1, CD94, NKG2C, NKG2E, or CD160.

[1006] In one embodiment, the NK cell engager is a ligand of NKp30 is a B7-6, e.g., comprises the amino acid sequence of: DLKVEMMAGGTQITPLNDNVTIFCNIFYSQPLNITSMGITWFWKSLTFDKEVKVF EFFGDHQEAFRPGAIVSPWRLKSGDASLRLPGIQLEEAGEYRCEVVVTPLKAQGTVQLEVV ASPASRLLLDQVGMKENEDKYMCESSGFYPEAINITWEKQTQKFPHPIEISEDVITGPTIKN MDGTFNVTSCLKLNSSQEDPGTVYQCVVRHASLHTPLRSNFTLTAARHSLSETEKTDNFS (SEQ ID NO: 3291), a fragment thereof, or an amino acid sequence substantially identical thereto (e.g., 95% to 99.9% identical thereto, or having at least one amino acid alteration, but not more than five, ten or fifteen alterations (e.g., substitutions, deletions, or insertions, e.g., conservative substitutions) to the amino acid sequence of SEQ ID NO: 3291.

[1007] In other embodiments, the NK cell engager is a ligand of NKp44 or NKp46, which is a viral HA. Viral hemagglutinins (HA) are glyco proteins which are on the surface of viruses. HA proteins allow viruses to bind to the membrane of cells via sialic acid sugar moieties which contributes to the fusion of viral membranes with the cell membranes (see e.g., Eur J Immunol. 2001 September; 31(9):2680-9 “Recognition of viral hemagglutinins by NKp44 but not by NKp30”; and Nature. 2001 Feb. 22; 409(6823):1055-60 “Recognition of haemaglutinins on virus-infected cells by NKp46 activates lysis by human NK cells” the contents of each of which are incorporated by reference herein).

[1008] In other embodiments, the NK cell engager is a ligand of NKG2D chosen from MICA, MICB, or ULBP1, e.g., wherein:

[1009] (i) MICA comprises the amino acid sequence:

(SEQ ID NO: 3292)
EPHSLRYNLTVLSWDGSVQSGFLTEVHLDGQPFLR
CDRQKCRAKPQGQWAEDVLGNKTWDRETRDLTGNG
KDLRMTLAHIKDQKEGLHSLQEIRVCEIHEDNSTR
SSQHFYYDGELFLSQNLETKEWTMPQSSRAQTLAM
NVRNFLKEDAMKTKTHYHAMHADCLQELRRYLKSG
VVLRRTVPPMVNVTRSEASEGNITVTCRASGFYPW
NITLSWRQDGVSLSHDTQQWGDVLPDGNGTYQTWV
ATRICQGEEQRFTCYMEHSGNHSTHPVPSGKVLVL
QSHW,

[1010] a fragment thereof, or an amino acid sequence substantially identical thereto (e.g., 95% to 99.9% identical thereto, or having at least one amino acid alteration, but not more than five, ten or fifteen alterations (e.g., substitutions, deletions, or insertions, e.g., conservative substitutions) to the amino acid sequence of SEQ ID NO: 3292;

[1011] (ii) MICB comprises the amino acid sequence:

(SEQ ID NO: 3293)
AEPHSLRYNLMVLSQDESVQSGFLAEGHLDGQPFL
RYDRQKRRAKPQGQWAEDVLGAKTWDTETEDLTEN
GQDLRRTLTHIKDQKGGLHSLQEIRVCEIHEDSST
RGSRHFYYDGELFLSQNLETQESTVPQSSRAQTLA
MNVTNFWKEDAMKTKTHYRAMQADCLQKLQRYLKS
GVAIRRTVPPMVNVTCSEVSEGNITVTCRASSFYP
RNITLTWRQDGVSLSHNTQQWGDVLPDGNGTYQTW
VATRIRQGEEQRFTCYMEHSGNHGTHPVPSGKVLV
LQSQRTD,

[1012] a fragment thereof, or an amino acid sequence substantially identical thereto (e.g., 95% to 99.9% identical thereto, or having at least one amino acid alteration, but not more than five, ten or fifteen alterations (e.g., substitutions, deletions, or insertions, e.g., conservative substitutions) to the amino acid sequence of SEQ ID NO: 3293; or

[1013] (iii) ULBP1 comprises the amino acid sequence: GWVDTHCLCYDFIITPKSRPEPQWCEVQGLVDERPFLHYDCVNHKAKAFASLGKKVNVTK TWEEQTETLRDVVDFLKGQLLDIQVENLIPIEPLTLQARMSCEHEAHGHGRGSWQFLFNGQ KFLLFDSNNRKWTALHPGAKKMTEKWEKNRDVTMFFQKISLGDCKMWLEEFLMYWEQM LDPTKPPSLAPG (SEQ ID NO: 3294), a fragment thereof, or an amino acid sequence substantially identical thereto (e.g., 95% to 99.9% identical thereto, or having at least one amino acid alteration, but not more than five, ten or fifteen alterations (e.g., substitutions, deletions, or insertions, e.g., conservative substitutions) to the amino acid sequence of SEQ ID NO: 3294.

[1014] In other embodiments, the NK cell engager is a ligand of DNAM1 chosen from NECTIN2 or NECL5, e.g., wherein:

[1015] (i) NECTIN2 comprises the amino acid sequence: QDVRVQVLPEVRGQLGGTVELPCHLLPPVPGLYISLVTWQRPDAPANHQNVAAFHPKMGP SFPSPKPGSERLSFVSAKQSTGQDTEAELQDATLALHGLTVEDEGNYTCEFATFPKGSVRG MTWLRVIAKPKNQAEAQKVTFSQDPTTVALCISKEGRPPARISWLSSLDWEAKETQVSGTL AGTVTVTSRFTLVPSGRADGVTVTCKVEHESFEEPALIPVTLSVRYPPEVSISGYDDNWYLG RTDATLSCDVRSNPEPTGYDWSTTSGTFPTSAVAQGSQLVIHAVDSLFNTTFVCTVTNAVG MGRAEQVIFVRETPNTAGAGATGG (SEQ ID NO: 3295), a fragment thereof, or an amino acid sequence substantially identical thereto (e.g., 95% to 99.9% identical thereto, or having at least one amino acid alteration, but not more than five, ten or fifteen alterations (e.g., substitutions, deletions, or insertions, e.g., conservative substitutions) to the amino acid sequence of SEQ ID NO: 3295; or

[1016] (ii) NECL5 comprises the amino acid sequence: WPPPGTGDVVVQAPTQVPGFLGDSVTLPCYLQVPNMEVTHVSQLTWARHGESGSMAVFH QTQGPSYSESKRLEFVAARLGAELRNASLRMFGLRVEDEGNYTCLFVTFPQGSRSVDIWLR VLAKPQNTAEVQKVQLTGEPVPMARCVSTGGRPPAQITWHSDLGGMPNTSQVPGFLSGTV TVTSLWILVPSSQVDGKNVTCKVEHESFEKPQLLTVNLTVYYPPEVSISGYDNNWYLGQNE ATLTCDARSNPEPTGYNWSTTMGPLPPFAVAQGAQLLIRPVDKPINTTLICNVTNALGARQ AELTVQVKEGPPSEHSGISRN (SEQ ID NO: 3296), a fragment thereof, or an amino acid sequence substantially identical thereto (e.g., 95% to 99.9% identical thereto, or having at least one amino acid alteration, but not more than five, ten or fifteen alterations (e.g., substitutions, deletions, or insertions, e.g., conservative substitutions) to the amino acid sequence of SEQ ID NO: 3296.

[1017] In yet other embodiments, the NK cell engager is a ligand of DAP10, which is an adapter for NKG2D (see e.g., Proc Natl Acad Sci USA. 2005 May 24; 102(21): 7641-7646; and Blood, 15 Sep. 2011 Volume 118, Number 11, the full contents of each of which is incorporated by reference herein).

[1018] In other embodiments, the NK cell engager is a ligand of CD16, which is a CD16a/b ligand, e.g., a CD16a/b ligand further comprising an antibody Fc region (see e.g., Front Immunol. 2013; 4: 76 discusses how antibodies use the Fc to trigger NK cells through CD16, the full contents of which are incorporated herein).

[1019] In other embodiments, the NK cell engager is a ligand of CRTAM, which is NECL2, e.g., wherein NECL2 comprises the amino acid sequence: QNLFTKDVTVIEGEVATISCQVNKSDDSVIQLLNPNRQTIYFRDFRPLKDSRFQLLNFSSSEL KVSLTNVSISDEGRYFCQLYTDPPQESYTTITVLVPPRNLMIDIQKDTAVEGEEIEVNCTAM ASKPATTIRWFKGNTELKGKSEVEEWSDMYTVTSQLMLKVHKEDDGVPVICQVEHPAVT GNLQTQRYLEVQYKPQVHIQMTYPLQGLTREGDALELTCEAIGKPQPVMVTWVRVDDEM PQHAVLSGPNLFINNLNKTDNGTYRCEASNIVGKAHSDYMLYVYDPPTTIPPPTTTTTTTTT TTTTILTIITDSRAGEEGSIRAVDH (SEQ ID NO: 3297), a fragment thereof, or an amino acid sequence substantially identical thereto (e.g., 95% to 99.9% identical thereto, or having at least one amino acid alteration, but not more than five, ten or fifteen alterations (e.g., substitutions, deletions, or insertions, e.g., conservative substitutions) to the amino acid sequence of SEQ ID NO: 3297.

[1020] In other embodiments, the NK cell engager is a ligand of CD27, which is CD70, e.g., wherein CD70 comprises the amino acid sequence: QRFAQAQQQLPLESLGWDVAELQLNHTGPQQDPRLYWQGGPALGRSFLHGPELDKGQLRI HRDGIYMVHIQVTLAICSSTTASRHHPTTLAVGICSPASRSISLLRLSFHQGCTIASQRLTPLA RGDTLCTNLTGTLLPSRNTDETFFGVQWVRP (SEQ ID NO: 3298), a fragment thereof, or an amino acid sequence substantially identical thereto (e.g., 95% to 99.9% identical thereto, or having at least one amino acid alteration, but not more than five, ten or fifteen alterations (e.g., substitutions, deletions, or insertions, e.g., conservative substitutions) to the amino acid sequence of SEQ ID NO: 3298.

[1021] In other embodiments, the NK cell engager is a ligand of PSGL1, which is L-selectin (CD62L), e.g., wherein L-selectin comprises the amino acid sequence:

(SEQ ID NO: 3299)
WTYHYSEKPMNWQRARRFCRDNYTDLVAIQNKAEI
EYLEKTLPFSRSYYWIGIRKIGGIWTWVGTNKSLT
EEAENWGDGEPNNKKNKEDCVEIYIKRNKDAGKWN
DDACHKLKAALCYTASCQPWSCSGHGECVEIINNY
TCNCDVGYYGPQCQFVIQCEPLEAPELGTMDCTHP
LGNFSFSSQCAFSCSEGTNLTGIEETTCGPFGNWS
SPEPTCQVIQCEPLSAPDLGIMNCSHPLASFSFTS
ACTFICSEGTELIGKKKTICESSGIWSNPSPICQK
LDKSFSMIKEGDYN,

[1022] a fragment thereof, or an amino acid sequence substantially identical thereto (e.g., 95% to 99.9% identical thereto, or having at least one amino acid alteration, but not more than five, ten or fifteen alterations (e.g., substitutions, deletions, or insertions, e.g., conservative substitutions) to the amino acid sequence of SEQ ID NO: 3299.

[1023] In other embodiments, the NK cell engager is a ligand of CD96, which is NECL5, e.g., wherein NECL5 comprises the amino acid sequence: WPPPGTGDVVVQAPTQVPGFLGDSVTLPCYLQVPNMEVTHVSQLTWARHGESGSMAVFH QTQGPSYSESKRLEFVAARLGAELRNASLRMFGLRVEDEGNYTCLFVTFPQGSRSVDIWLR VLAKPQNTAEVQKVQLTGEPVPMARCVSTGGRPPAQITWHSDLGGMPNTSQVPGFLSGTV TVTSLWILVPSSQVDGKNVTCKVEHESFEKPQLLTVNLTVYYPPEVSISGYDNNWYLGQNE ATLTCDARSNPEPTGYNWSTTMGPLPPFAVAQGAQLLIRPVDKPINTTLICNVTNALGARQ AELTVQVKEGPPSEHSGISRN (SEQ ID NO: 3296), a fragment thereof, or an amino acid sequence substantially identical thereto (e.g., 95% to 99.9% identical thereto, or having at least one amino acid alteration, but not more than five, ten or fifteen alterations (e.g., substitutions, deletions, or insertions, e.g., conservative substitutions) to the amino acid sequence of SEQ ID NO: 3296.

[1024] In other embodiments, the NK cell engager is a ligand of CD100 (SEMA4D), which is CD72, e.g., wherein CD72 comprises the amino acid sequence: RYLQVSQQLQQTNRVLEVTNSSLRQQLRLKITQLGQSAEDLQGSRRELAQSQEALQVEQR AHQAAEGQLQACQADRQKTKETLQSEEQQRRALEQKLSNMENRLKPFFTCGSADTCCPSG WIMHQKSCFYISLTSKNWQESQKQCETLSSKLATFSEIYPQSHSYYFLNSLLPNGGSGNSYW TGLSSNKDWKLTDDTQRTRTYAQSSKCNKVHKTWSWWTLESESCRSSLPYICEMTAFRFP D (SEQ ID NO: 3300), a fragment thereof, or an amino acid sequence substantially identical thereto (e.g., 95% to 99.9% identical thereto, or having at least one amino acid alteration, but not more than five, ten or fifteen alterations (e.g., substitutions, deletions, or insertions, e.g., conservative substitutions) to the amino acid sequence of SEQ ID NO: 3300.

[1025] In other embodiments, the NK cell engager is a ligand of NKp80, which is CLEC2B (AICL), e.g., wherein CLEC2B (AICL) comprises the amino acid sequence: KLTRDSQSLCPYDWIGFQNKCYYFSKEEGDWNSSKYNCSTQHADLTIIDNIEEM NFLRRYKCSSDHWIGLKMAKNRTGQWVDGATFTKSEGMRGSEGCAYLSDDGAATARCY TERKWICRKRIH (SEQ ID NO: 3301), a fragment thereof, or an amino acid sequence substantially identical thereto (e.g., 95% to 99.9% identical thereto, or having at least one amino acid alteration, but not more than five, ten or fifteen alterations (e.g., substitutions, deletions, or insertions, e.g., conservative substitutions) to the amino acid sequence of SEQ ID NO: 3301.

[1026] In other embodiments, the NK cell engager is a ligand of CD244, which is CD48, e.g., wherein CD48 comprises the amino acid sequence: QGHLVHMTVVSGSNVTLNISESLPENYKQLTWFYTFDQKIVEWDSRKSKYFESKFKGRVR LDPQSGALYISKVQKEDNSTYIMRVLKKTGNEQEWKIKLQVLDPVPKPVIKIEKIEDMDDN CYLKLSCVIPGESVNYTWYGDKRPFPKELQNSVLETTLMPHNYSRCYTCQVSNSVSSKNGT VCLSPPCTLARS (SEQ ID NO: 3302), a fragment thereof, or an amino acid sequence substantially identical thereto (e.g., 95% to 99.9% identical thereto, or having at least one amino acid alteration, but not more than five, ten or fifteen alterations (e.g., substitutions, deletions, or insertions, e.g., conservative substitutions) to the amino acid sequence of SEQ ID NO: 3302.

[1027] T Cell Engagers

[1028] The present disclosure provides, inter alia, multispecific (e.g., bi-, tri-, quad-specific) or multifunctional molecules, that are engineered to contain one or more T cell engager that mediate binding to and/or activation of a T cell. In some embodiments, the T cell engager is an antigen binding domain that binds to, e.g., activates TCRβ, e.g., a TCRβV region, as described herein. In some embodiments, the T cell engager is selected from an antigen binding domain or ligand that binds to (e.g., and in some embodiments activates) one or more of CD3, TCRα, TCRγ, TCRζ, ICOS, CD28, CD27, HVEM, LIGHT, CD40, 4-1BB, OX40, DR3, GITR, CD30, TIM1, SLAM, CD2, or CD226. In other embodiments, the T cell engager is selected from an antigen binding domain or ligand that binds to and does not activate one or more of CD3, TCRα, TCRγ, TCRζ, ICOS, CD28, CD27, HVEM, LIGHT, CD40, 4-1BB, OX40, DR3, GITR, CD30, TIM1, SLAM, CD2, or CD226.

### B Cell, Macrophage & Dendritic Cell Engagers

[1029] Broadly, B cells, also known as B lymphocytes, are a type of white blood cell of the lymphocyte subtype. They function in the humoral immunity component of the adaptive immune system by secreting antibodies. Additionally, B cells present antigen (they are also classified as professional antigen-presenting cells (APCs)) and secrete cytokines. Macrophages are a type of white blood cell that engulfs and digests cellular debris, foreign substances, microbes, cancer cells via phagocytosis. Besides phagocytosis, they play important roles in nonspecific defense (innate immunity) and also help initiate specific defense mechanisms (adaptive immunity) by recruiting other immune cells such as lymphocytes. For example, they are important as antigen presenters to T cells. Beyond increasing inflammation and stimulating the immune system, macrophages also play an important anti-inflammatory role and can decrease immune reactions through the release of cytokines. Dendritic cells (DCs) are antigen-presenting cells that function in processing antigen material and present it on the cell surface to the T cells of the immune system.

[1030] The present disclosure provides, inter alia, multispecific (e.g., bi-, tri-, quad-specific) or multifunctional molecules, that include, e.g., are engineered to contain, one or more B cell, macrophage, and/or dendritic cell engager that mediate binding to and/or activation of a B cell, macrophage, and/or dendritic cell.

[1031] Accordingly, in some embodiments, the immune cell engager comprises a B cell, macrophage, and/or dendritic cell engager chosen from one or more of CD40 ligand (CD40L) or a CD70 ligand; an antibody molecule that binds to CD40 or CD70; an antibody molecule to OX40; an OX40 ligand (OX40L); an agonist of a Toll-like receptor (e.g., as described herein, e.g., a TLR4, e.g., a constitutively active TLR4 (caTLR4), or a TLR9 agonists); a 41BB; a CD2; a CD47; or a STING agonist, or a combination thereof.

[1032] In some embodiments, the B cell engager is a CD40L, an OX40L, or a CD70 ligand, or an antibody molecule that binds to OX40, CD40 or CD70.

[1033] In some embodiments, the macrophage engager is a CD2 agonist. In some embodiments, the macrophage engager is an antigen binding domain that binds to: CD40L or antigen binding domain or ligand that binds CD40, a Toll like receptor (TLR) agonist (e.g., as described herein), e.g., a TLR9 or TLR4 (e.g., caTLR4 (constitutively active TLR4), CD47, or a STING agonist. In some embodiments, the STING agonist is a cyclic dinucleotide, e.g., cyclic di-GMP (cdGMP) or cyclic di-AMP (cdAMP). In some embodiments, the STING agonist is biotinylated.

[1034] In some embodiments, the dendritic cell engager is a CD2 agonist. In some embodiments, the dendritic cell engager is a ligand, a receptor agonist, or an antibody molecule that binds to one or more of: OX40L, 41BB, a TLR agonist (e.g., as described herein) (e.g., TLR9 agonist, TLR4 (e.g., caTLR4 (constitutively active TLR4)), CD47, or and a STING agonist. In some embodiments, the STING agonist is a cyclic dinucleotide, e.g., cyclic di-GMP (cdGMP) or cyclic di-AMP (cdAMP). In some embodiments, the STING agonist is biotinylated.

[1035] In other embodiments, the immune cell engager mediates binding to, or activation of, one or more of a B cell, a macrophage, and/or a dendritic cell. Exemplary B cell, macrophage, and/or dendritic cell engagers can be chosen from one or more of CD40 ligand (CD40L) or a CD70 ligand; an antibody molecule that binds to CD40 or CD70; an antibody molecule to OX40; an OX40 ligand (OX40L); a Toll-like receptor agonist (e.g., a TLR4, e.g., a constitutively active TLR4 (caTLR4) or a TLR9 agonist); a 41BB agonist; a CD2; a CD47; or a STING agonist, or a combination thereof.

[1036] In some embodiments, the B cell engager is chosen from one or more of a CD40L, an OX40L, or a CD70 ligand, or an antibody molecule that binds to OX40, CD40 or CD70.

[1037] In other embodiments, the macrophage cell engager is chosen from one or more of a CD2 agonist; a CD40L; an OX40L; an antibody molecule that binds to OX40, CD40 or CD70; a Toll-like receptor agonist or a fragment thereof (e.g., a TLR4, e.g., a constitutively active TLR4 (caTLR4)); a CD47 agonist; or a STING agonist.

[1038] In other embodiments, the dendritic cell engager is chosen from one or more of a CD2 agonist, an OX40 antibody, an OX40L, 41BB agonist, a Toll-like receptor agonist or a fragment thereof (e.g., a TLR4, e.g., a constitutively active TLR4 (caTLR4)), CD47 agonist, or a STING agonist.

[1039] In one embodiment, the OX40L comprises the amino acid sequence: QVSHRYPRIQSIKVQFTEYKKEKGFILTSQKEDEIMKVQNNSVIINCDGFYLISLKGYFSQEV NISLHYQKDEEPLFQLKKVRSVNSLMVASLTYKDKVYLNVTTDNTSLDDFHVNGGELILIH QNPGEFCVL (SEQ ID NO: 3303), a fragment thereof, or an amino acid sequence substantially identical thereto (e.g., 95% to 99.9% identical thereto, or having at least one amino acid alteration, but not more than five, ten or fifteen alterations (e.g., substitutions, deletions, or insertions, e.g., conservative substitutions) to the amino acid sequence of SEQ ID NO: 3303.

[1040] In another embodiment, the CD40L comprises the amino acid sequence: MQKGDQNPQIAAHVISEASSKTTSVLQWAEKGYYTMSNNLVTLENGKQLTVKRQGLYYI YAQVTFCSNREASSQAPFIASLCLKSPGRFERILLRAANTHSSAKPCGQQSIHLGGVFELQPG ASVFVNVTDPSQVSHGTGFTSFGLLKL (SEQ ID NO: 3304), a fragment thereof, or an amino acid sequence substantially identical thereto (e.g., 95% to 99.9% identical thereto, or having at least one amino acid alteration, but not more than five, ten or fifteen alterations (e.g., substitutions, deletions, or insertions, e.g., conservative substitutions) to the amino acid sequence of SEQ ID NO: 3304.

[1041] In yet other embodiments, the STING agonist comprises a cyclic dinucleotide, e.g., a cyclic di-GMP (cdGMP), a cyclic di-AMP (cdAMP), or a combination thereof, optionally with 2′,5′ or 3′,5′ phosphate linkages.

[1042] In one embodiment, the immune cell engager includes 41BB ligand, e.g., comprising the amino acid sequence: ACPWAVSGARASPGSAASPRLREGPELSPDDPAGLLDLRQGMFAQLVAQNVLLIDGPLSW YSDPGLAGVSLTGGLSYKEDTKELVVAKAGVYYVFFQLELRRVVAGEGSGSVSLALHLQP LRSAAGAAALALTVDLPPASSEARNSAFGFQGRLLHLSAGQRLGVHLHTEARARHAWQLT QGATVLGLFRVTPEIPAGLPSPRSE (SEQ ID NO: 3305), a fragment thereof, or an amino acid sequence substantially identical thereto (e.g., 95% to 99.9% identical thereto, or having at least one amino acid alteration, but not more than five, ten or fifteen alterations (e.g., substitutions, deletions, or insertions, e.g., conservative substitutions) to the amino acid sequence of SEQ ID NO: 3305.

### Toll-Like Receptors

[1043] Toll-Like Receptors (TLRs) are evolutionarily conserved receptors are homologues of the Drosophila Toll protein, and recognize highly conserved structural motifs known as pathogen-associated microbial patterns (PAMPs), which are exclusively expressed by microbial pathogens, or danger-associated molecular patterns (DAMPs) that are endogenous molecules released from necrotic or dying cells. PAMPs include various bacterial cell wall components such as lipopolysaccharide (LPS), peptidoglycan (PGN) and lipopeptides, as well as flagellin, bacterial DNA and viral double-stranded RNA. DAMPs include intracellular proteins such as heat shock proteins as well as protein fragments from the extracellular matrix. Stimulation of TLRs by the corresponding PAMPs or DAMPs initiates signaling cascades leading to the activation of transcription factors, such as AP-1, NF-κB and interferon regulatory factors (IRFs). Signaling by TLRs results in a variety of cellular responses, including the production of interferons (IFNs), pro-inflammatory cytokines and effector cytokines that direct the adaptive immune response. TLRs are implicated in a number of inflammatory and immune disorders and play a role in cancer (Rakoff-Nahoum S. & Medzhitov R., 2009. Toll-like receptors and cancer. Nat Revs Cancer 9:57-63.)

[1044] TLRs are type I transmembrane proteins characterized by an extracellular domain containing leucine-rich repeats (LRRs) and a cytoplasmic tail that contains a conserved region called the Toll/IL-1 receptor (TIR) domain. Ten human and twelve murine TLRs have been characterized, TLR1 to TLR10 in humans, and TLR1 to TLR9, TLR11, TLR12 and TLR13 in mice, the homolog of TLR10 being a pseudogene. TLR2 is essential for the recognition of a variety of PAMPs from Gram-positive bacteria, including bacterial lipoproteins, lipomannans and lipoteichoic acids. TLR3 is implicated in virus-derived double-stranded RNA. TLR4 is predominantly activated by lipopolysaccharide. TLRS detects bacterial flagellin and TLR9 is required for response to unmethylated CpG DNA. Finally, TLR7 and TLR8 recognize small synthetic antiviral molecules, and single-stranded RNA was reported to be their natural ligand. TLR11 has been reported to recognize uropathogenic E. coli and a profilin-like protein from Toxoplasma gondii. The repertoire of specificities of the TLRs is apparently extended by the ability of TLRs to heterodimerize with one another. For example, dimers of TLR2 and TLR6 are required for responses to diacylated lipoproteins while TLR2 and TLR1 interact to recognize triacylated lipoproteins. Specificities of the TLRs are also influenced by various adapter and accessory molecules, such as MD-2 and CD14 that form a complex with TLR4 in response to LPS.

[1045] TLR signaling consists of at least two distinct pathways: a MyD88-dependent pathway that leads to the production of inflammatory cytokines, and a MyD88-independent pathway associated with the stimulation of IFN-β and the maturation of dendritic cells. The MyD88-dependent pathway is common to all TLRs, except TLR3 (Adachi O. et al., 1998. Targeted disruption of the MyD88 gene results in loss of IL-1- and IL-18-mediated function. Immunity. 9(1):143-50). Upon activation by PAMPs or DAMPs, TLRs hetero- or homodimerize inducing the recruitment of adaptor proteins via the cytoplasmic TIR domain. Individual TLRs induce different signaling responses by usage of the different adaptor molecules. TLR4 and TLR2 signaling requires the adaptor TIRAP/Mal, which is involved in the MyD88-dependent pathway. TLR3 triggers the production of IFN-β in response to double-stranded RNA, in a MyD88-independent manner, through the adaptor TRIF/TICAM-1. TRAM/TICAM-2 is another adaptor molecule involved in the MyD88-independent pathway which function is restricted to the TLR4 pathway.

[1046] TLR3, TLR7, TLR8 and TLR9 recognize viral nucleic acids and induce type I IFNs. The signaling mechanisms leading to the induction of type I IFNs differ depending on the TLR activated. They involve the interferon regulatory factors, IRFs, a family of transcription factors known to play a critical role in antiviral defense, cell growth and immune regulation. Three IRFs (IRF3, IRF5 and IRF7) function as direct transducers of virus-mediated TLR signaling. TLR3 and TLR4 activate IRF3 and IRF7, while TLR7 and TLR8 activate IRF5 and IRF7 (Doyle S. et al., 2002. IRF3 mediates a TLR3/TLR4-specific antiviral gene program. Immunity. 17(3):251-63). Furthermore, type I IFN production stimulated by TLR9 ligand CpG-A has been shown to be mediated by PI(3)K and mTOR (Costa-Mattioli M. & Sonenberg N. 2008. RAPping production of type I interferon in pDCs through mTOR. Nature Immunol. 9: 1097-1099).

[1047] TLR-9

[1048] TLR9 recognizes unmethylated CpG sequences in DNA molecules. CpG sites are relatively rare (˜1%) on vertebrate genomes in comparison to bacterial genomes or viral DNA. TLR9 is expressed by numerous cells of the immune system such as B lymphocytes, monocytes, natural killer (NK) cells, and plasmacytoid dendritic cells. TLR9 is expressed intracellularly, within the endosomal compartments and functions to alert the immune system of viral and bacterial infections by binding to DNA rich in CpG motifs. TLR9 signals leads to activation of the cells initiating pro-inflammatory reactions that result in the production of cytokines such as type-I interferon and IL-12.

[1049] TLR Agonists

[1050] A TLR agonist can agonize one or more TLR, e.g., one or more of human TLR-1, 2, 3, 4, 5, 6, 7, 8, 9, or 10. In some embodiments, an adjunctive agent described herein is a TLR agonist. In some embodiments, the TLR agonist specifically agonizes human TLR-9. In some embodiments, the TLR-9 agonist is a CpG moiety. As used herein, a CpG moiety, is a linear dinucleotide having the sequence: 5′-C-phosphate-G-3′, that is, cytosine and guanine separated by only one phosphate.

[1051] In some embodiments, the CpG moiety comprises at least 1, 2, 3, 4, 5, 6, 7, 8, 9, 10, 11, 12, 13, 14, 15, 16, 17, 18, 19, 20, 21, 22, 23, 24, 25, 26, 27, 28, 29, 30, or more CpG dinucleotides. In some embodiments, the CpG moiety consists of 1, 2, 3, 4, 5, 6, 7, 8, 9, 10, 11, 12, 13, 14, 15, 16, 17, 18, 19, 20, 21, 22, 23, 24, 25, 26, 27, 28, 29, or 30 CpG dinucleotides. In some embodiments, the CpG moiety has 1-5, 1-10, 1-20, 1-30, 1-40, 1-50, 5-10, 5-20, 5-30, 10-20, 10-30, 10-40, or 10-50 CpG dinucleotides.

[1052] In some embodiments, the TLR-9 agonist is a synthetic ODN (oligodeoxynucleotides). CpG ODNs are short synthetic single-stranded DNA molecules containing unmethylated CpG dinucleotides in particular sequence contexts (CpG motifs). CpG ODNs possess a partially or completely phosphorothioated (PS) backbone, as opposed to the natural phosphodiester (P0) backbone found in genomic bacterial DNA. There are three major classes of CpG ODNs: classes A, B and C, which differ in their immunostimulatory activities. CpG-A ODNs are characterized by a PO central CpG-containing palindromic motif and a PS-modified 3′ poly-G string. They induce high IFN-α production from pDCs but are weak stimulators of TLR9-dependent NF-κB signaling and pro-inflammatory cytokine (e.g. IL-6) production. CpG-B ODNs contain a full PS backbone with one or more CpG dinucleotides. They strongly activate B cells and TLR9-dependent NF-κB signaling but weakly stimulate IFN-α secretion. CpG-C ODNs combine features of both classes A and B. They contain a complete PS backbone and a CpG-containing palindromic motif. C-Class CpG ODNs induce strong IFN-α production from pDC as well as B cell stimulation.

### Tumor-Targeting Moieties

[1053] The present disclosure provides, inter alia, multispecific (e.g., bi-, tri-, tetra-specific) molecules, that include, e.g., are engineered to contain, one or more tumor specific targeting moieties that direct the molecule to a tumor cell.

[1054] In certain embodiments, the multispecific molecules disclosed herein include a tumor-targeting moiety. The tumor targeting moiety can be chosen from an antibody molecule (e.g., an antigen binding domain as described herein), a receptor or a receptor fragment, or a ligand or a ligand fragment, or a combination thereof. In some embodiments, the tumor targeting moiety associates with, e.g., binds to, a tumor cell (e.g., a molecule, e.g., antigen, present on the surface of the tumor cell). In certain embodiments, the tumor targeting moiety targets, e.g., directs the multispecific molecules disclosed herein to a cancer (e.g., a cancer or tumor cells). In some embodiments, the cancer is chosen from a hematological cancer, a solid cancer, a metastatic cancer, or a combination thereof.

[1055] In some embodiments, the multispecific molecule, e.g., the tumor-targeting moiety, binds to a solid tumor antigen or a stromal antigen. The solid tumor antigen or stromal antigen can be present on a solid tumor, or a metastatic lesion thereof. In some embodiments, the solid tumor is chosen from one or more of pancreatic (e.g., pancreatic adenocarcinoma), breast, colorectal, lung (e.g., small or non-small cell lung cancer), skin, ovarian, or liver cancer. In one embodiment, the solid tumor is a fibrotic or desmoplastic solid tumor. For example, the solid tumor antigen or stromal antigen can be present on a tumor, e.g., a tumor of a class typified by having one or more of: limited tumor perfusion, compressed blood vessels, or fibrotic tumor interstitium.

[1056] In certain embodiments, the solid tumor antigen is chosen from one or more of: PDL1, CD47, gangloside 2 (GD2), prostate stem cell antigen (PSCA), prostate specific membrane antigen (PMSA), prostate-specific antigen (PSA), carcinoembryonic antigen (CEA), Ron Kinase, c-Met, Immature laminin receptor, TAG-72, BING-4, Calcium-activated chloride channel 2, Cyclin-B1, 9D7, Ep-CAM, EphA3, Her2/neu, Telomerase, SAP-1, Survivin, NY-ESO-1/LAGE-1, PRAME, SSX-2, Melan-A/MART-1, Gp100/pme117, Tyrosinase, TRP-1/-2, MC1R, β-catenin, BRCA1/2, CDK4, CML66, Fibronectin, p53, Ras, TGF-B receptor, AFP, ETA, MAGE, MUC-1, CA-125, BAGE, GAGE, NY-ESO-1, β-catenin, CDK4, CDC27, CD47, a actinin-4, TRP1/gp75, TRP2, gp100, Melan-A/MART1, gangliosides, WT1, EphA3, Epidermal growth factor receptor (EGFR), MART-2, MART-1, MUC1, MUC2, MUM1, MUM2, MUM3, NA88-1, NPM, OA1, OGT, RCC, RUI1, RUI2, SAGE, TRG, TRP1, TSTA, Folate receptor alpha, L1-CAM, CAIX, EGFRvIII, gpA33, GD3, GM2, VEGFR, Intergrins (Integrin alphaVbeta3, Integrin alpha5Beta1), Carbohydrates (Le), IGF1R, EPHA3, TRAILR1, TRAILR2, or RANKL.

[1057] In other embodiments, the multispecific molecule, e.g., the tumor-targeting moiety, binds to a molecule, e.g., antigen, present on the surface of a hematological cancer, e.g., a leukemia or a lymphoma. In some embodiments, the hematological cancer is a B-cell or T cell malignancy. In some embodiments, the hematological cancer is chosen from one or more of a Hodgkin's lymphoma, Non-Hodgkin's lymphoma (e.g., B cell lymphoma, diffuse large B cell lymphoma, follicular lymphoma, chronic lymphocytic leukemia, mantle cell lymphoma, marginal zone B-cell lymphoma, Burkitt lymphoma, lymphoplasmacytic lymphoma, hairy cell leukemia), acute myeloid leukemia (AML), chronic myeloid leukemia, myelodysplastic syndrome (MDS), multiple myeloma, or acute lymphocytic leukemia. In embodiments, the cancer is other than acute myeloid leukemia (AML) or myelodysplastic syndrome (MDS). In embodiments, the hematological antigen is chosen from CD47, CD99, CD30, CD38, SLAMF7, or NY-ESO1. In some embodiments, the hematological antigen is chosen from is chosen from one or more of: BCMA, CD19, CD20, CD22, CD33, CD123, FcRH5, CLEC12, or CD179A.

### Stromal Modifying Moieties

[1058] Solid tumors have a distinct structure that mimics that of normal tissues and comprises two distinct but interdependent compartments: the parenchyma (neoplastic cells) and the stroma that the neoplastic cells induce and in which they are dispersed. All tumors have stroma and require stroma for nutritional support and for the removal of waste products. In the case of tumors which grow as cell suspensions (e.g., leukemias, ascites tumors), the blood plasma serves as stroma (Connolly J L et al. Tumor Structure and Tumor Stroma Generation. In: Kufe D W et al., editors. Holland-Frei Cancer Medicine. 6th edition. Hamilton: BC Decker; 2003). The stroma includes a variety of cell types, including fibroblasts/myofibroblasts, glial, epithelial, fat, vascular, smooth muscle, and immune cells along with extracellular matrix (ECM) and extracellular molecules (Li Hanchen et al. Tumor Microenvironment: The Role of the Tumor Stroma in Cancer. J of Cellular Biochemistry 101: 805-815 (2007)).

[1059] Stromal modifying moieties described herein include moieties (e.g., proteins, e.g., enzymes) capable of degrading a component of the stroma, e.g., an ECM component, e.g., a glycosaminoglycan, e.g., hyaluronan (also known as hyaluronic acid or HA), chondroitin sulfate, chondroitin, dermatan sulfate, heparin sulfate, heparin, entactin, tenascin, aggrecan and keratin sulfate; or an extracellular protein, e.g., collagen, laminin, elastin, fibrinogen, fibronectin, and vitronectin.

### Stromal Modifying Enzymes

[1060] In some embodiments, the stromal modifying moiety is an enzyme. For example, the stromal modifying moiety can include, but is not limited to a hyaluronidase, a collagenase, a chondroitinase, a matrix metalloproteinase (e.g., macrophage metalloelastase).

[1061] Hyaluronidases

[1062] Hyaluronidases are a group of neutral- and acid-active enzymes found throughout the animal kingdom. Hyaluronidases vary with respect to substrate specificity, and mechanism of action. There are three general classes of hyaluronidases: (1) Mammalian-type hyaluronidases, (EC 3.2.1.35) which are endo-beta-N-acetylhexosaminidases with tetrasaccharides and hexasaccharides as the major end products. They have both hydrolytic and transglycosidase activities, and can degrade hyaluronan and chondroitin sulfates; (2) Bacterial hyaluronidases (EC 4.2.99.1) degrade hyaluronan and, and to various extents, chondroitin sulfate and dermatan sulfate. They are endo-beta-N-acetylhexosaminidases that operate by a beta elimination reaction that yields primarily disaccharide end products; (3) Hyaluronidases (EC 3.2.1.36) from leeches, other parasites, and crustaceans are endo-beta-glucuronidases that generate tetrasaccharide and hexasaccharide end products through hydrolysis of the beta 1-3 linkage.

[1063] Mammalian hyaluronidases can be further divided into two groups: (1) neutral active and (2) acid active enzymes. There are six hyaluronidase-like genes in the human genome, HYAL1, HYAL2, HYAL3 HYAL4 HYALP1 and PH20/SPAM1. HYALP1 is a pseudogene, and HYAL3 has not been shown to possess enzyme activity toward any known substrates. HYAL4 is a chondroitinase and lacks activity towards hyaluronan. HYAL1 is the prototypical acid-active enzyme and PH20 is the prototypical neutral-active enzyme. Acid active hyaluronidases, such as HYAL1 and HYAL2 lack catalytic activity at neutral pH. For example, HYAL1 has no catalytic activity in vitro over pH 4.5 (Frost and Stern, “A Microtiter-Based Assay for Hyaluronidase Activity Not Requiring Specialized Reagents”, Analytical Biochemistry, vol. 251, pp. 263-269 (1997). HYAL2 is an acid active enzyme with a very low specific activity in vitro.

[1064] In some embodiments the hyaluronidase is a mammalian hyaluronidase. In some embodiments the hyaluronidase is a recombinant human hyaluronidase. In some embodiments, the hyaluronidase is a neutral active hyaluronidase. In some embodiments, the hyaluronidase is a neutral active soluble hyaluronidase. In some embodiments, the hyaluronidase is a recombinant PH20 neutral-active enzyme. In some embodiments, the hyaluronidase is a recombinant PH20 neutral-active soluble enzyme. In some embodiments the hyaluronidase is glycosylated. In some embodiments, the hyaluronidase possesses at least one N-linked glycan. A recombinant hyaluronidase can be produced using conventional methods known to those of skill in the art, e.g., U.S. Pat. No. 7,767,429, the entire contents of which are incorporated by reference herein.

[1065] In some embodiments the hyaluronidase is rHuPH20 (also referred to as Hylenex®; presently manufactured by Halozyme; approved by the FDA in 2005 (see e.g., Scodeller P (2014) Hyaluronidase and other Extracellular Matrix Degrading Enzymes for Cancer Therapy: New Uses and Nano-Formulations. J Carcinog Mutage 5:178; U.S. Pat. Nos. 7,767,429; 8,202,517; 7,431,380; 8,450,470; 8,772,246; 8,580,252, the entire contents of each of which is incorporated by reference herein). rHuPH20 is produced by genetically engineered CHO cells containing a DNA plasmid encoding for a soluble fragment of human hyaluronidase PH20. In some embodiments the hyaluronidase is glycosylated. In some embodiments, the hyaluronidase possesses at least one N-linked glycan. A recombinant hyaluronidase can be produced using conventional methods known to those of skill in the art, e.g., U.S. Pat. No. 7,767,429, the entire contents of which are incorporated by reference herein. In some embodiments, rHuPH20 has a sequence at least 95% (e.g., at least 96%, 97%, 98%, 99%, 100%) identical to the amino acid sequence of

(SEQ ID NO: 3306)
LNFRAPPVIPNVPFLWAWNAPSEFCLGKFDEPLDM
SLFSFIGSPRINATGQGVTIFYVDRLGYYPYIDSI
TGVTVNGGIPQKISLQDHLDKAKKDITFYMPVDNL
GMAVIDWEEWRPTWARNWKPKDVYKNRSIELVQQQ
NVQLSLTEATEKAKQEFEKAGKDFLVETIKLGKLL
RPNHLWGYYLFPDCYNHHYKKPGYNGSCFNVEIKR
NDDLSWLWNESTALYPSIYLNTQQSPVAATLYVRN
RVREAIRVSKIPDAKSPLPVFAYTRIVFTDQVLKF
LSQDELVYTFGETVALGASGIVIWGTLSIMRSMKS
CLLLDNYMETILNPYIINVTLAAKMCSQVLCQEQG
VCIRKNWNSSDYLHLNPDNFAIQLEKGGKFTVRGK
PTLEDLEQFSEKFYCSCYSTLSCKEKADVKDTDAV
DVCIADGVCIDAFLKPPMETEEPQIFYNASPSTLS.

[1066] In any of the methods provided herein, the anti-hyaluronan agent can be an agent that degrades hyaluronan or can be an agent that inhibits the synthesis of hyaluronan. For example, the anti-hyaluronan agent can be a hyaluronan degrading enzyme. In another example, the anti-hyaluronan agent or is an agent that inhibits hyaluronan synthesis. For example, the anti-hyaluronan agent is an agent that inhibits hyaluronan synthesis such as a sense or antisense nucleic acid molecule against an HA synthase or is a small molecule drug. For example, an anti-hyaluronan agent is 4-methylumbelliferone (MU) or a derivative thereof, or leflunomide or a derivative thereof. Such derivatives include, for example, a derivative of 4-methylumbelliferone (MU) that is 6,7-dihydroxy-4-methyl coumarin or 5,7-dihydroxy-4-methyl coumarin.

[1067] In further examples of the methods provided herein, the hyaluronan degrading enzyme is a hyaluronidase. In some examples, the hyaluronan-degrading enzyme is a PH20 hyaluronidase or truncated form thereof to lacking a C-terminal glycosylphosphatidylinositol (GPI) attachment site or a portion of the GPI attachment site. In specific examples, the hyaluronidase is a PH20 selected from a human, monkey, bovine, ovine, rat, mouse or guinea pig PH20. For example, the hyaluronan-degrading enzyme is a human PH20 hyaluronidase that is neutral active and N-glycosylated and is selected from among (a) a hyaluronidase polypeptide that is a full-length PH20 or is a C-terminal truncated form of the PH20, wherein the truncated form includes at least amino acid residues 36-464 of SEQ ID NO: 139, such as 36-481, 36-482, 36-483, where the full-length PH20 has the sequence of amino acids set forth in SEQ ID NO: 139; or (b) a hyaluronidase polypeptide comprising a sequence of amino acids having at least 85%, 86%, 87%, 88%, 89%, 90%, 91%, 92%, 93%, 94%, 95%, 96%, 97%, 98%, 99% or more sequence identity with the polypeptide or truncated form of sequence of amino acids set forth in SEQ ID NO: 139; or (c) a hyaluronidase polypeptide of (a) or (b) comprising amino acid substitutions, whereby the hyaluronidase polypeptide has a sequence of amino acids having at least 85%, 86%, 87%, 88%, 89%, 90%, 91%, 92%, 93%, 94%, 95%, 96%, 97%, 98%, 99% or more sequence identity with the polypeptide set forth in SEQ ID NO: 139 or the with the corresponding truncated forms thereof. In exemplary examples, the hyaluronan-degrading enzyme is a PH20 that comprises a composition designated rHuPH20.

[1068] In other examples, the anti-hyaluronan agent is a hyaluronan degrading enzyme that is modified by conjugation to a polymer. The polymer can be a PEG and the anti-hyaluronan agent a PEGylated hyaluronan degrading enzyme. Hence, in some examples of the methods provided herein the hyaluronan-degrading enzyme is modified by conjugation to a polymer. For example, the hyaluronan-degrading enzyme is conjugated to a PEG, thus the hyaluronan degrading enzyme is PEGylated. In an exemplary example, the hyaluronan-degrading enzyme is a PEGylated PH20 enzyme (PEGPH20). In the methods provided herein, the corticosteroid can be a glucocorticoid that is selected from among cortisones, dexamethasones, hydrocortisones, methylprednisolones, prednisolones and prednisones.

[1069] Chondroitinases

[1070] Chondroitinases are enzymes found throughout the animal kingdom which degrade glycosaminoglycans, specifically chondroitins and chondroitin sulfates, through an endoglycosidase reaction. In some embodiments the chondroitinase is a mammalian chondroitinase. In some embodiments the chondroitinase is a recombinant human chondroitinase. In some embodiments the chondroitinase is HYAL4. Other exemplary chondroitinases include chondroitinase ABC (derived from Proteus vulgaris; Japanese Patent Application Laid-open No 6-153947, T. Yamagata et al. J. Biol. Chem., 243, 1523 (1968), S. Suzuki et al, J. Biol. Chem., 243, 1543 (1968)), chondroitinase AC (derived from Flavobacterium heparinum; T. Yamagata et al., J. Biol. Chem., 243, 1523 (1968)), chondroitinase AC II (derived from Arthrobacter aurescens; K. Hiyama, and S. Okada, J. Biol. Chem., 250, 1824 (1975), K. Hiyama and S. Okada, J. Biochem. (Tokyo), 80, 1201 (1976)), Hyaluronidase ACIII (derived from Flavobacterium sp. Hp102; Hirofumi Miyazono et al., Seikagaku, 61, 1023 (1989)), chondroitinase B (derived from Flavobacterium heparinum; Y. M. Michelacci and C. P. Dietrich, Biochem. Biophys. Res. Commun., 56, 973 (1974), Y. M. Michelacci and C. P. Dietrich, Biochem. J., 151, 121 (1975), Kenichi Maeyama et al, Seikagaku, 57, 1189 (1985)), chondroitinase C (derived from Flavobacterium sp. Hp102; Hirofumi Miyazono et al, Seikagaku, 61, 1023 (1939)), and the like.

[1071] Matrix Metalloproteinases

[1072] Matrix metalloproteases (MMPs) are zinc-dependent endopeptidases that are the major proteases involved in extracellular matrix (ECM) degradation. MMPs are capable of degrading a wide range of extracellular molecules and a number of bioactive molecules. Twenty-four MMP genes have been identified in humans, which can be organized into six groups based on domain organization and substrate preference: Collagenases (MMP-1, -8 and -13), Gelatinases (MMP-2 and MMP-9), Stromelysins (MMP-3, -10 and -11), Matrilysin (MMP-7 and MMP-26), Membrane-type (MT)-MMPs (MMP-14, -15, -16, -17, -24 and -25) and others (MMP-12, -19, -20, -21, -23, -27 and -28). In some embodiments, the stromal modifying moiety is a human recombinant MMP (e.g., MMP-1, -2, -3, -4, -5, -6, -7, -8, -9, 10, -11, -12, -13, -14, 15, -15, -17, -18, -19, 20, -21, -22, -23, or -24).

[1073] Collagenases

[1074] The three mammalian collagenases (MMP-1, -8, and -13) are the principal secreted endopeptidases capable of cleaving collagenous extracellular matrix. In addition to fibrillar collagens, collagenases can cleave several other matrix and non-matrix proteins including growth factors. Collagenases are synthesized as inactive pro-forms, and once activated, their activity is inhibited by specific tissue inhibitors of metalloproteinases, TIMPs, as well as by non-specific proteinase inhibitors (Ala-aho R et al. Biochimie. Collagenases in cancer. 2005 March-April; 87(3-4):273-86). In some embodiments, the stromal modifying moiety is a collagenase. In some embodiments, the collagenase is a human recombinant collagenase. In some embodiments, the collagenase is MMP-1. In some embodiments, the collagenase is MMP-8. In some embodiments, the collagenase is MMP-13.

[1075] Macrophage Metalloelastase

[1076] Macrophage metalloelastase (MME), also known as MMP-12, is a member of the stromelysin subgroup of MMPs and catalyzes the hydrolysis of soluble and insoluble elastin and a broad selection of matrix and nonmatrix substrates including type IV collagen, fibronectin, laminin, vitronectin, entactin, heparan, and chondroitin sulfates (Erja Kerkelä et al. Journal of Investigative Dermatology (2000) 114, 1113-1119; doi:10.1046/j.1523-1747.2000.00993). In some embodiments, the stromal modifying moiety is a MME. In some embodiments, the MME is a human recombinant MME. In some embodiments, the MME is MMP-12.

### Additional Stromal Modifying Moieties

[1077] In some embodiments, the stromal modifying moiety causes one or more of: decreases the level or production of a stromal or extracellular matrix (ECM) component; decreases tumor fibrosis; increases interstitial tumor transport; improves tumor perfusion; expands the tumor microvasculature; decreases interstitial fluid pressure (IFP) in a tumor; or decreases or enhances penetration or diffusion of an agent, e.g., a cancer therapeutic or a cellular therapy, into a tumor or tumor vasculature.

[1078] In some embodiments, the stromal or ECM component decreased is chosen from a glycosaminoglycan or an extracellular protein, or a combination thereof. In some embodiments, the glycosaminoglycan is chosen from hyaluronan (also known as hyaluronic acid or HA), chondroitin sulfate, chondroitin, dermatan sulfate, heparin, heparin sulfate, entactin, tenascin, aggrecan and keratin sulfate. In some embodiments, the extracellular protein is chosen from collagen, laminin, elastin, fibrinogen, fibronectin, or vitronectin. In some embodiments, the stromal modifying moiety includes an enzyme molecule that degrades a tumor stroma or extracellular matrix (ECM). In some embodiments, the enzyme molecule is chosen from a hyaluronidase molecule, a collagenase molecule, a chondroitinase molecule, a matrix metalloproteinase molecule (e.g., macrophage metalloelastase), or a variant (e.g., a fragment) of any of the aforesaid. The term “enzyme molecule” includes a full length, a fragment or a variant of the enzyme, e.g., an enzyme variant that retains at least one functional property of the naturally-occurring enzyme.

[1079] In some embodiments, the stromal modifying moiety decreases the level or production of hyaluronic acid. In other embodiments, the stromal modifying moiety comprises a hyaluronan degrading enzyme, an agent that inhibits hyaluronan synthesis, or an antibody molecule against hyaluronic acid.

[1080] In some embodiments, the hyaluronan degrading enzyme is a hyaluronidase molecule, e.g., a full length or a variant (e.g., fragment thereof) thereof. In some embodiments, the hyaluronan degrading enzyme is active in neutral or acidic pH, e.g., pH of about 4-5. In some embodiments, the hyaluronidase molecule is a mammalian hyaluronidase molecule, e.g., a recombinant human hyaluronidase molecule, e.g., a full length or a variant (e.g., fragment thereof, e.g., a truncated form) thereof. In some embodiments, the hyaluronidase molecule is chosen from HYAL1, HYAL2, or PH-20/SPAM1, or a variant thereof (e.g., a truncated form thereof). In some embodiments, the truncated form lacks a C-terminal glycosylphosphatidylinositol (GPI) attachment site or a portion of the GPI attachment site. In some embodiments, the hyaluronidase molecule is glycosylated, e.g., comprises at least one N-linked glycan.

[1081] In some embodiments, the hyaluronidase molecule comprises the amino acid sequence: LNFRAPPVIPNVPFLWAWNAPSEFCLGKFDEPLDMSLFSFIGSPRINATGQGVTIFYVDRLG YYPYIDSITGVTVNGGIPQKISLQDHLDKAKKDITFYMPVDNLGMAVIDWEEWRPTWARN WKPKDVYKNRSIELVQQQNVQLSLTEATEKAKQEFEKAGKDFLVETIKLGKLLRPNHLWG YYLFPDCYNHHYKKPGYNGSCFNVEIKRNDDLSWLWNESTALYPSIYLNTQQSPVAATLY VRNRVREAIRVSKIPDAKSPLPVFAYTRIVFTDQVLKFLSQDELVYTFGETVALGASGIVIW GTLSIMRSMKSCLLLDNYMETILNPYIINVTLAAKMCSQVLCQEQGVCIRKNWNSSDYLHL NPDNFAIQLEKGGKFTVRGKPTLEDLEQFSEKFYCSCYSTLSCKEKADVKDTDAVDVCIAD GVCIDAFLKPPMETEEPQIFYNASPSTLS (SEQ ID NO:3311), or a fragment thereof, or an amino acid sequence substantially identical thereto (e.g., 95% to 99.9% identical thereto, or having at least one amino acid alteration, but not more than five, ten or fifteen alterations (e.g., substitutions, deletions, or insertions, e.g., conservative substitutions) to the amino acid sequence of SEQ ID NO: 3311.

[1082] In some embodiments, the hyaluronidase molecule comprises:

[1083] (i) the amino acid sequence of 36-464 of SEQ ID NO: 3311;

[1084] (ii) the amino acid sequence of 36-481, 36-482, or 36-483 of PH20, wherein PH20 has the sequence of amino acids set forth in SEQ ID NO: 3311; or

[1085] (iii) an amino acid sequence having at least 95% to 100% sequence identity to the polypeptide or truncated form of sequence of amino acids set forth in SEQ ID NO: 3311; or

[1086] (iv) an amino acid sequence having 30, 20, 10, 5 or fewer amino acid substitutions to the amino acid sequence set forth in SEQ ID NO: 3311. In some embodiments, the hyaluronidase molecule comprises an amino acid sequence at least 95% (e.g., at least 95%, 96%, 97%, 98%, 99%, 100%) identical to the amino acid sequence of SEQ ID NO: 3311. In some embodiments, the hyaluronidase molecule is encoded by a nucleotide sequence at least 95% (e.g., at least 96%, 97%, 98%, 99%, 100%) identical to the nucleotide sequence of SEQ ID NO: 3311.

[1087] In some embodiments, the hyaluronidase molecule is PH20, e.g., rHuPH20. In some embodiments, the hyaluronidase molecule is HYAL1 and comprises the amino acid sequence: FRGPLLPNRPFTTVWNANTQWCLERHGVDVDVSVFDVVANPGQTFRGPDMTIFYSSQGTY PYYTPTGEPVFGGLPQNASLIAHLARTFQDILAAIPAPDFSGLAVIDWEAWRPRWAFNWDT KDIYRQRSRALVQAQHPDWPAPQVEAVAQDQFQGAARAWMAGTLQLGRALRPRGLWGF YGFPDCYNYDFLSPNYTGQCPSGIRAQNDQLGWLWGQSRALYPSIYMPAVLEGTGKSQM YVQHRVAEAFRVAVAAGDPNLPVLPYVQIFYDTTNHFLPLDELEHSLGESAAQGAAGVVL WVSWENTRTKESCQAIKEYMDTTLGPFILNVTSGALLCSQALCSGHGRCVRRTSHPKALLL LNPASFSIQLTPGGGPLSLRGALSLEDQAQMAVEFKCRCYPGWQAPWCERKSMW (SEQ ID NO: 3312), or a fragment thereof, or an amino acid sequence substantially identical thereto (e.g., 95% to 99.9% identical thereto, or having at least one amino acid alteration, but not more than five, ten or fifteen alterations (e.g., substitutions, deletions, or insertions, e.g., conservative substitutions) to the amino acid sequence of SEQ ID NO: 3312.

[1088] In some embodiments, the hyaluronan degrading enzyme, e.g., the hyaluronidase molecule, further comprises a polymer, e.g., is conjugated to a polymer, e.g., PEG. In some embodiments, the hyaluronan-degrading enzyme is a PEGylated PH20 enzyme (PEGPH20). In some embodiments, the hyaluronan degrading enzyme, e.g., the hyaluronidase molecule, further comprises an immunoglobulin chain constant region (e.g., Fc region) chosen from, e.g., the heavy chain constant regions of IgG1, IgG2, IgG3, and IgG4, more particularly, the heavy chain constant region of human IgG1, IgG2, IgG3, or IgG4. In some embodiments, the immunoglobulin constant region (e.g., the Fc region) is linked, e.g., covalently linked to, the hyaluronan degrading enzyme, e.g., the hyaluronidase molecule. In some embodiments, the immunoglobulin chain constant region (e.g., Fc region) is altered, e.g., mutated, to increase or decrease one or more of: Fc receptor binding, antibody glycosylation, the number of cysteine residues, effector cell function, or complement function. In some embodiments, the hyaluronan degrading enzyme, e.g., the hyaluronidase molecule forms a dimer.

[1089] In some embodiments, the stromal modifying moiety comprises an inhibitor of the synthesis of hyaluronan, e.g., an HA synthase. In some embodiments, the inhibitor comprises a sense or an antisense nucleic acid molecule against an HA synthase or is a small molecule drug. In some embodiments, the inhibitor is 4-methylumbelliferone (MU) or a derivative thereof (e.g., 6,7-dihydroxy-4-methyl coumarin or 5,7-dihydroxy-4-methyl coumarin), or leflunomide or a derivative thereof.

[1090] In some embodiments, the stromal modifying moiety comprises antibody molecule against hyaluronic acid.

[1091] In some embodiments, the stromal modifying moiety comprises a collagenase molecule, e.g., a mammalian collagenase molecule, or a variant (e.g., fragment) thereof. In some embodiments, the collagenase molecule is collagenase molecule IV, e.g., comprising the amino acid sequence of: YNFFPRKPKWDKNQITYRIIGYTPDLDPETVDDAFARAFQVWSDVTPLRFSRIHDGEADIMI NFGRWEHGDGYPFDGKDGLLAHAFAPGTGVGGDSHFDDDELWTLGEGQVVRVKYGNAD GEYCKFPFLFNGKEYNSCTDTGRSDGFLWCSTTYNFEKDGKYGFCPHEALFTMGGNAEGQ PCKFPFRFQGTSYDSCTTEGRTDGYRWCGTTEDYDRDKKYGFCPETAMSTVGGNSEGAPC VFPFTFLGNKYESCTSAGRSDGKMWCATTANYDDDRKWGFCPDQGYSLFLVAAHEFGHA MGLEHSQDPGALMAPIYTYTKNFRLSQDDIKGIQELYGASPDIDLGTGPTPTLGPVTPEICK QDIVFDGIAQIRGEIFFFKDRFIWRTVTPRDKPMGPLLVATFWPELPEKIDAVYEAPQEEKA VFFAGNEYWIYSASTLERGYPKPLTSLGLPPDVQRVDAAFNWSKNKKTYIFAGDKFWRYN EVKKKMDPGFPKLIADAWNAIPDNLDAVVDLQGGGHSYFFKGAYYLKLENQSLKSVKFG SIKSDWLGC (SEQ ID NO: 3313), or a fragment thereof, or an amino acid sequence substantially identical thereto (e.g., 95% to 99.9% identical thereto, or having at least one amino acid alteration, but not more than five, ten or fifteen alterations (e.g., substitutions, deletions, or insertions, e.g., conservative substitutions) to the amino acid sequence of SEQ ID NO: 3313.

### Linkers

[1092] The multispecific or multifunctional molecule disclosed herein can further include a linker, e.g., a linker between one or more of: the antigen binding domain and the cytokine molecule, the antigen binding domain and the immune cell engager, the antigen binding domain and the stromal modifying moiety, the cytokine molecule and the immune cell engager, the cytokine molecule and the stromal modifying moiety, the immune cell engager and the stromal modifying moiety, the antigen binding domain and the immunoglobulin chain constant region, the cytokine molecule and the immunoglobulin chain constant region, the immune cell engager and the immunoglobulin chain constant region, or the stromal modifying moiety and the immunoglobulin chain constant region. In embodiments, the linker is chosen from: a cleavable linker, a non-cleavable linker, a peptide linker, a flexible linker, a rigid linker, a helical linker, or a non-helical linker, or a combination thereof.

[1093] In one embodiment, the multispecific molecule can include one, two, three or four linkers, e.g., a peptide linker. In one embodiment, the peptide linker includes Gly and Ser. In some embodiments, the peptide linker is selected from GGGGS (SEQ ID NO: 3307); GGGGSGGGGS (SEQ ID NO: 3308); GGGGSGGGGSGGGGS (SEQ ID NO: 3309); and DVPSGPGGGGGSGGGGS (SEQ ID NO: 3310). In some embodiments, the peptide linker is a A(EAAAK)nA (SEQ ID NO: 3437) family of linkers (e.g., as described in Protein Eng. (2001) 14 (8): 529-532). These are stiff helical linkers with n ranging from 2-5. In some embodiments, the peptide linker is selected from AEAAAKEAAAKAAA (SEQ ID NO: 3314); AEAAAKEAAAKEAAAKAAA (SEQ ID NO: 3315); AEAAAKEAAAKEAAAKEAAAKAAA (SEQ ID NO: 3316); and AEAAAKEAAAKEAAAKEAAAKEAAAKAAA(SEQ ID NO: 3317).

### Nucleic Acids

[1094] Nucleic acids encoding the aforementioned antibody molecules, e.g., anti-TCRβV antibody molecules, multispecific or multifunctional molecules are also disclosed.

[1095] In certain embodiments, the invention features nucleic acids comprising nucleotide sequences that encode heavy and light chain variable regions and CDRs or hypervariable loops of the antibody molecules, as described herein. For example, the invention features a first and second nucleic acid encoding heavy and light chain variable regions, respectively, of an antibody molecule chosen from one or more of the antibody molecules disclosed herein. The nucleic acid can comprise a nucleotide sequence as set forth in the tables herein, or a sequence substantially identical thereto (e.g., a sequence at least about 85%, 90%, 95%, 99% or more identical thereto, or which differs by no more than 3, 6, 15, 30, or 45 nucleotides from the sequences shown in the tables herein.

[1096] In certain embodiments, the nucleic acid can comprise a nucleotide sequence encoding at least one, two, or three CDRs or hypervariable loops from a heavy chain variable region having an amino acid sequence as set forth in the tables herein, or a sequence substantially homologous thereto (e.g., a sequence at least about 85%, 90%, 95%, 99% or more identical thereto, and/or having one or more substitutions, e.g., conserved substitutions). In other embodiments, the nucleic acid can comprise a nucleotide sequence encoding at least one, two, or three CDRs or hypervariable loops from a light chain variable region having an amino acid sequence as set forth in the tables herein, or a sequence substantially homologous thereto (e.g., a sequence at least about 85%, 90%, 95%, 99% or more identical thereto, and/or having one or more substitutions, e.g., conserved substitutions). In yet another embodiment, the nucleic acid can comprise a nucleotide sequence encoding at least one, two, three, four, five, or six CDRs or hypervariable loops from heavy and light chain variable regions having an amino acid sequence as set forth in the tables herein, or a sequence substantially homologous thereto (e.g., a sequence at least about 85%, 90%, 95%, 99% or more identical thereto, and/or having one or more substitutions, e.g., conserved substitutions).

[1097] In certain embodiments, the nucleic acid can comprise a nucleotide sequence encoding at least one, two, or three CDRs or hypervariable loops from a heavy chain variable region having the nucleotide sequence as set forth in the tables herein, a sequence substantially homologous thereto (e.g., a sequence at least about 85%, 90%, 95%, 99% or more identical thereto, and/or capable of hybridizing under the stringency conditions described herein). In another embodiment, the nucleic acid can comprise a nucleotide sequence encoding at least one, two, or three CDRs or hypervariable loops from a light chain variable region having the nucleotide sequence as set forth in the tables herein, or a sequence substantially homologous thereto (e.g., a sequence at least about 85%, 90%, 95%, 99% or more identical thereto, and/or capable of hybridizing under the stringency conditions described herein). In yet another embodiment, the nucleic acid can comprise a nucleotide sequence encoding at least one, two, three, four, five, or six CDRs or hypervariable loops from heavy and light chain variable regions having the nucleotide sequence as set forth in the tables herein, or a sequence substantially homologous thereto (e.g., a sequence at least about 85%, 90%, 95%, 99% or more identical thereto, and/or capable of hybridizing under the stringency conditions described herein).

[1098] In certain embodiments, the nucleic acid can comprise a nucleotide sequence encoding a cytokine molecule, an immune cell engager, or a stromal modifying moiety disclosed herein.

[1099] In another aspect, the application features host cells and vectors containing the nucleic acids described herein. The nucleic acids may be present in a single vector or separate vectors present in the same host cell or separate host cell, as described in more detail hereinbelow.

### Vectors

[1100] Further provided herein are vectors comprising the nucleotide sequences encoding antibody molecules, e.g., anti-TCRβV antibody molecules, or a multispecific or multifunctional molecule described herein. In one embodiment, the vectors comprise nucleic acid sequences encoding antibody molecules, e.g., anti-TCRβV antibody molecules, or multispecific or multifunctional molecule described herein. In one embodiment, the vectors comprise the nucleotide sequences described herein. The vectors include, but are not limited to, a virus, plasmid, cosmid, lambda phage or a yeast artificial chromosome (YAC).

[1101] Numerous vector systems can be employed. For example, one class of vectors utilizes DNA elements which are derived from animal viruses such as, for example, bovine papilloma virus, polyoma virus, adenovirus, vaccinia virus, baculovirus, retroviruses (Rous Sarcoma Virus, MMTV or MOMLV) or SV40 virus. Another class of vectors utilizes RNA elements derived from RNA viruses such as Semliki Forest virus, Eastern Equine Encephalitis virus and Flaviviruses.

[1102] Additionally, cells which have stably integrated the DNA into their chromosomes may be selected by introducing one or more markers which allow for the selection of transfected host cells. The marker may provide, for example, prototropy to an auxotrophic host, biocide resistance (e.g., antibiotics), or resistance to heavy metals such as copper, or the like. The selectable marker gene can be either directly linked to the DNA sequences to be expressed, or introduced into the same cell by cotransformation. Additional elements may also be needed for optimal synthesis of mRNA. These elements may include splice signals, as well as transcriptional promoters, enhancers, and termination signals.

[1103] Once the expression vector or DNA sequence containing the constructs has been prepared for expression, the expression vectors may be transfected or introduced into an appropriate host cell. Various techniques may be employed to achieve this, such as, for example, protoplast fusion, calcium phosphate precipitation, electroporation, retroviral transduction, viral transfection, gene gun, lipid based transfection or other conventional techniques. In the case of protoplast fusion, the cells are grown in media and screened for the appropriate activity

[1104] Methods and conditions for culturing the resulting transfected cells and for recovering the antibody molecule produced are known to those skilled in the art, and may be varied or optimized depending upon the specific expression vector and mammalian host cell employed, based upon the present description.

### Cells

[1105] In another aspect, the application features host cells and vectors containing the nucleic acids described herein. The nucleic acids may be present in a single vector or separate vectors present in the same host cell or separate host cell. The host cell can be a eukaryotic cell, e.g., a mammalian cell, an insect cell, a yeast cell, or a prokaryotic cell, e.g., E. coli. For example, the mammalian cell can be a cultured cell or a cell line. Exemplary mammalian cells include lymphocytic cell lines (e.g., NSO), Chinese hamster ovary cells (CHO), COS cells, oocyte cells, and cells from a transgenic animal, e.g., mammary epithelial cell.

[1106] The invention also provides host cells comprising a nucleic acid encoding an antibody molecule as described herein.

[1107] In one embodiment, the host cells are genetically engineered to comprise nucleic acids encoding the antibody molecule.

[1108] In one embodiment, the host cells are genetically engineered by using an expression cassette. The phrase “expression cassette,” refers to nucleotide sequences, which are capable of affecting expression of a gene in hosts compatible with such sequences. Such cassettes may include a promoter, an open reading frame with or without introns, and a termination signal. Additional factors necessary or helpful in effecting expression may also be used, such as, for example, an inducible promoter.

[1109] The invention also provides host cells comprising the vectors described herein.

[1110] The cell can be, but is not limited to, a eukaryotic cell, a bacterial cell, an insect cell, or a human cell. Suitable eukaryotic cells include, but are not limited to, Vero cells, HeLa cells, COS cells, CHO cells, HEK293 cells, BHK cells and MDCKII cells. Suitable insect cells include, but are not limited to, Sf9 cells.

Method of Expanding Cells with Anti-TCRVB Antibodies

[1111] Any of the compositions and methods described herein can be used to expand an immune cell population. An immune cell provided herein includes an immune cell derived from a hematopoietic stem cell or an immune cell derived from a non-hematopoietic stem cell, e.g., by differentiation or de-differentiation.

[1112] An immune cell includes a hematopoietic stem cell, progeny thereof and/or cells that have differentiated from said HSC, e.g., lymphoid cells or myeloid cells. An immune cell can be an adaptive immune cell or an innate immune cell. Examples of immune cells include T cells, B cells, Natural Killer cells, Natural Killer T cells, neutrophils, dendritic cells, monocytes, macrophages, and granulocytes.

[1113] In some embodiments of any of the methods of compositions disclosed herein, an immune cell is a T cell. In some embodiments, a T cell includes a CD4+ T cell, a CD8+ T cell, a TCR alpha-beta T cell, a TCR gamma-delta T cell. In some embodiments, a T cell comprises a memory T cell (e.g., a central memory T cell, or an effector memory T cell (e.g., a TEMRA) or an effector T cell. In some embodiments, a T cell comprises a tumor infiltrating lymphocyte (TIL).

[1114] In some embodiments of any of the methods of compositions disclosed herein, an immune cell is an NK cell.

[1115] In some embodiments of any of the methods of compositions disclosed herein, an immune cell is a TIL. TILs are immune cells (e.g., T cells, B cells or NK cells) that can be found in a tumor or around a tumor (e.g., in the stroma or tumor microenvironment of a tumor), e.g., a solid tumor, e.g., as described herein. TILs can be obtained from a sample from a subject having cancer, e.g., a biopsy or a surgical sample. In some embodiments, TILs can be expanded using a method disclosed herein. In some embodiments, a population of expanded TILs, e.g., expanded using a method disclosed herein, can be administered to a subject to treat a disease, e.g., a cancer.

[1116] In certain aspects of the present disclosure, immune cells, e.g., T cells (e.g., TILs), can be obtained from a unit of blood collected from a subject using any number of techniques known to the skilled artisan, such as Ficoll™ separation. In one aspect, cells from the circulating blood of an individual are obtained by apheresis. The apheresis product typically contains lymphocytes, including T cells, monocytes, granulocytes, B cells, other nucleated white blood cells, red blood cells, and platelets. In one aspect, the cells collected by apheresis may be washed to remove the plasma fraction and, optionally, to place the cells in an appropriate buffer or media for subsequent processing steps. In one embodiment, the cells are washed with phosphate buffered saline (PBS). In an alternative embodiment, the wash solution lacks calcium and may lack magnesium or may lack many if not all divalent cations. The methods described herein can include more than one selection step, e.g., more than one depletion step.

[1117] In one embodiment, the methods of the application can utilize culture media conditions comprising DMEM, DMEM F12, RPMI 1640, and/or AIM V media. The media can be supplemented with glutamine, HEPES buffer (e.g., 10 mM), serum (e.g., heat-inactivated serum, e.g., 10%), and/or beta mercaptoethanol (e.g., 55 uM). IN some embodiments, the culture conditions disclosed herein comprise one or more supplements, cytokines, growth factors, or hormones. In some embodiments, the culture condition comprises one or more of IL-2, IL-15, or IL-7, or a combination thereof.

[1118] Immune effector cells such as T cells may be activated and expanded generally using methods as described, for example, in U.S. Pat. Nos. 6,352,694; 6,534,055; or 6,905,680. Generally, a population of immune cells, may be expanded by contact with an agent that stimulates a CD3/TCR complex associated signal and a ligand that stimulates a costimulatory molecule on the surface of the T cells; and/or by contact with a cytokine, e.g., IL-2, IL-15 or IL-7. T cell expansion protocols can also include stimulation, such as by contact with an anti-CD3 antibody, or antigen-binding fragment thereof, or an anti-CD2 antibody immobilized on a surface, or by contact with a protein kinase C activator (e.g., bryostatin) in conjunction with a calcium ionophore. For example, a population of T cells can be contacted with an anti-CD3 antibody and an anti-CD28 antibody, under conditions appropriate for stimulating proliferation of the T cells. To stimulate proliferation of either CD4+ T cells or CD8+ T cells, an anti-CD3 antibody and an anti-CD28 antibody can be used. Examples of an anti-CD28 antibody include 9.3, B-T3, XR-CD28 (Diaclone, Besancon, France) can be used as can other methods commonly known in the art (Berg et al., Transplant Proc. 30(8):3975-3977, 1998; Haanen et al., J. Exp. Med. 190(9):13191328, 1999; Garland et al., J. Immunol Meth. 227(1-2):53-63, 1999).

[1119] A TIL population can also be expanded by methods known in the art. For example, a population of TILs can be expanded as described in Hall et al., Journal for ImmunoTherapy of Cancer (2016) 4:61, the entire contents of which are hereby incorporated by reference. Briefly, TILs can be isolated from a sample by mechanical and/or physical digestion. The resultant TIL population can be stimulated with an anti-CD3 antibody in the presence of non-dividing feeder cells. In some embodiments, the TIL population can be cultured, e.g., expanded, in the presence of IL-2, e.g., human IL-2. In some embodiments, the TIL cells can be cultured, e.g., expanded for a period of at least 1-21 days, e.g., at least 1, 2, 3, 4, 5, 6, 7, 8, 9, 10, 11, 12, 13, 14, 15, 16, 17, 18, 19, 20 or 21 days.

[1120] As disclosed herein, in some embodiments, an immune cell population (e.g., a T cell (e.g., a TEMRA cell or a TIL population) can be expanded by contacting the immune cell population with an anti-TCRVB antibody, e.g., as described herein.

[1121] In some embodiments, the expansion occurs in vivo, e.g., in a subject. In some embodiments, a subject is administered an anti-TCRβV antibody molecule disclosed herein resulting in expansion of immune cells in vivo.

[1122] In some embodiments, the expansion occurs ex vivo, e.g., in vitro. In some embodiments, cells from a subject, e.g., T cells, e.g., TIL cells, are expanded in vitro with an anti-TCRβV antibody molecule disclosed herein. In some embodiments, the expanded TILs are administered to the subject to treat a disease or a symptom of a disease.

[1123] In some embodiments, a method of expansion disclosed herein results in an expansion of at least 1.1-10 fold, 10-20 fold, or 20-50 fold expansion. In some embodiments, the expansion is at least 1.1, 1.2, 1.3, 1.4, 1.5, 2, 3, 4, 5, 6, 7, 8, 9, 10, 15, 20, 25, 30, 35, 40, 45 or 50 fold expansion.

[1124] In some embodiments, a method of expansion disclosed herein comprises culturing, e.g., expanding, the cells for at least about 4 hours, 6 hours, 10 hours, 12 hours, 15 hours, 18 hours, 20 hours, or 22 hours. In some embodiments, a method of expansion disclosed herein comprises culturing, e.g., expanding, the cells for at least 1, 2, 3, 4, 5, 6, 7, 8, 9, 10, 11, 12, 13, 14, 15, 1, 6 17, 18, 19, 20 or 21 days. In some embodiments, a method of expansion disclosed herein comprises culturing, e.g., expanding, the cells for at least about 1 week, 2 weeks, 3 weeks, 4 weeks, 5 weeks, 6 weeks, 7 weeks or 8 weeks.

[1125] In some embodiments, a method of expansion disclosed herein is performed on immune cells obtained from a healthy subject.

[1126] In some embodiments, a method of expansion disclosed herein is performed on immune cells (e.g., TILs) obtained from a subject having a disease, e.g., a cancer, e.g., a solid tumor as disclosed herein.

[1127] In some embodiments, a method of expansion disclosed herein further comprises contacting the population of cells with an agent, that promotes, e.g., increases, immune cell expansion. In some embodiments, the agent comprises an immune checkpoint inhibitor, e.g., a PD-1 inhibitor, a LAG-3 inhibitor, a CTLA4 inhibitor, or a TIM-3 inhibitor. In some embodiments, the agent comprises a 4-1BB agonist, e.g., an anti-4-1BB antibody.

[1128] Without wishing to be bound by theory, it is believed that an anti-TCRβV antibody molecule disclosed herein can expand, e.g., selectively or preferentially expand, T cells expressing a T cell receptor (TCR) comprising a TCR alpha and/or TCR beta molecule, e.g., TCR alpha-beta T cells (αβ T cells). In some embodiments, an anti-TCRβV antibody molecule disclosed herein does not expand, or induce proliferation of T cells expressing a TCR comprising a TCR gamma and/or TCR delta molecule, e.g., TCR gamma-delta T cells (γδ T cells). In some embodiments, an anti-TCRβV antibody molecule disclosed herein, selectively or preferentially expands αβ T cells over γδ T cells.

[1129] Without wishing to be bound by theory, it is believed that, in some embodiments, γδ T cells are associated with cytokine release syndrome (CRS) and/or neurotoxicity (NT). In some embodiments, an anti-TCRβV antibody molecule disclosed herein results in selective expansion of non-γδ T cells, e.g., expansion of αβ T cells, thus reducing CRS and/or NT.

[1130] In some embodiments, any of the compositions or methods disclosed herein result in an immune cell population having a reduction of, e.g., depletion of, γδ T cells. In some embodiments, the immune cell population is contacted with an agent that reduces, e.g., inhibits or depletes, γδ T cells, e.g., an anti-IL-17 antibody or an agent that binds to a TCR gamma and/or TCR delta molecule.

### Uses and Combination Therapies

[1131] Methods described herein include treating a cancer in a subject by using an anti-TCRβV antibody molecule, a multispecific or multifunctional molecule described herein, e.g., using a pharmaceutical composition described herein. Also provided are methods for reducing or ameliorating a symptom of a cancer in a subject, as well as methods for inhibiting the growth of a cancer and/or killing one or more cancer cells. In embodiments, the methods described herein decrease the size of a tumor and/or decrease the number of cancer cells in a subject administered with a described herein or a pharmaceutical composition described herein.

[1132] In embodiments, the cancer is a hematological cancer. In embodiments, the hematological cancer is a leukemia or a lymphoma. As used herein, a “hematologic cancer” refers to a tumor of the hematopoietic or lymphoid tissues, e.g., a tumor that affects blood, bone marrow, or lymph nodes. Exemplary hematologic malignancies include, but are not limited to, leukemia (e.g., acute lymphoblastic leukemia (ALL), acute myeloid leukemia (AML), chronic lymphocytic leukemia (CLL), chronic myelogenous leukemia (CIVIL), hairy cell leukemia, acute monocytic leukemia (AMoL), chronic myelomonocytic leukemia (CMML), juvenile myelomonocytic leukemia (JMML), or large granular lymphocytic leukemia), lymphoma (e.g., AIDS-related lymphoma, cutaneous T-cell lymphoma, Hodgkin lymphoma (e.g., classical Hodgkin lymphoma or nodular lymphocyte-predominant Hodgkin lymphoma), mycosis fungoides, non-Hodgkin lymphoma (e.g., B-cell non-Hodgkin lymphoma (e.g., Burkitt lymphoma, small lymphocytic lymphoma (CLL/SLL), diffuse large B-cell lymphoma, follicular lymphoma, immunoblastic large cell lymphoma, precursor B-lymphoblastic lymphoma, or mantle cell lymphoma) or T-cell non-Hodgkin lymphoma (mycosis fungoides, anaplastic large cell lymphoma, or precursor T-lymphoblastic lymphoma)), primary central nervous system lymphoma, Sézary syndrome, Waldenström macroglobulinemia), chronic myeloproliferative neoplasm, Langerhans cell histiocytosis, multiple myeloma/plasma cell neoplasm, myelodysplastic syndrome, or myelodysplastic/myeloproliferative neoplasm.

[1133] In embodiments, the cancer is a myeloproliferative neoplasm, e.g., primary or idiopathic myelofibrosis (MF), essential thrombocytosis (ET), polycythemia vera (PV), or chronic myelogenous leukemia (CML). In embodiments, the cancer is myelofibrosis. In embodiments, the subject has myelofibrosis. In embodiments, the subject has a calreticulin mutation, e.g., a calreticulin mutation disclosed herein. In embodiments, the subject does not have the JAK2-V617F mutation. In embodiments, the subject has the JAK2-V617F mutation. In embodiments, the subject has a MPL mutation. In embodiments, the subject does not have a MPL mutation.

[1134] In embodiments, the cancer is a solid cancer. Exemplary solid cancers include, but are not limited to, ovarian cancer, rectal cancer, stomach cancer, testicular cancer, cancer of the anal region, uterine cancer, colon cancer, rectal cancer, renal-cell carcinoma, liver cancer, non-small cell carcinoma of the lung, cancer of the small intestine, cancer of the esophagus, melanoma, Kaposi's sarcoma, cancer of the endocrine system, cancer of the thyroid gland, cancer of the parathyroid gland, cancer of the adrenal gland, bone cancer, pancreatic cancer, skin cancer, cancer of the head or neck, cutaneous or intraocular malignant melanoma, uterine cancer, brain stem glioma, pituitary adenoma, epidermoid cancer, carcinoma of the cervix squamous cell cancer, carcinoma of the fallopian tubes, carcinoma of the endometrium, carcinoma of the vagina, sarcoma of soft tissue, cancer of the urethra, carcinoma of the vulva, cancer of the penis, cancer of the bladder, cancer of the kidney or ureter, carcinoma of the renal pelvis, spinal axis tumor, neoplasm of the central nervous system (CNS), primary CNS lymphoma, tumor angiogenesis, metastatic lesions of said cancers, or combinations thereof.

[1135] In some embodiments, the cancer is acute lymphoblastic leukemia, acute lymphocytic leukemia, acute myelogenous leukemia, aplastic anemia, chronic myelogenous leukemia, desmoplastic small round cell tumor, Ewing's sarcoma, Hodgkin's disease, multiple myeloma, myelodysplasia, Non-Hodgkin's lymphoma, paroxysmal nocturnal hemoglobinuria, radiation poisoning, chronic lymphocytic leukemia, AL amyloidosis, essential thrombocytosis, polycythemia vera, severe aplastic anemia, neuroblastoma, breast tumors, ovarian tumors, renal cell carcinoma, autoimmune disorders, such as systemic sclerosis, osteopetrosis, inherited metabolic disorders, juvenile chronic arthritis, adrenoleukodystrophy, amegakaryocytic thrombocytopenia, sickle cell disease, severe congenital immunodeficiency, Griscelli syndrome type II, Hurler syndrome, Kostmann syndrome, Krabbe disease, metachromatic leukodystrophy, thalassemia, hemophagocytic lymphohistiocytosis, and Wiskott-Aldrich syndrome, leukemias, lymphomas, melanomas, neuroendocrine tumors, carcinomas and sarcomas. Exemplary cancers that may be treated with a compound, pharmaceutical composition, or method provided herein include lymphoma, sarcoma, bladder cancer, bone cancer, brain tumor, cervical cancer, colon cancer, esophageal cancer, gastric cancer, head and neck cancer, kidney cancer, myeloma, thyroid cancer, leukemia, prostate cancer, breast cancer (e.g. triple negative, ER positive, ER negative, chemotherapy resistant, herceptin resistant, HER2 positive, doxorubicin resistant, tamoxifen resistant, ductal carcinoma, lobular carcinoma, primary, metastatic), ovarian cancer, pancreatic cancer, liver cancer (e.g., hepatocellular carcinoma), lung cancer (e.g. non-small cell lung carcinoma, squamous cell lung carcinoma, adenocarcinoma, large cell lung carcinoma, small cell lung carcinoma, carcinoid, sarcoma), glioblastoma multiforme, glioma, melanoma, prostate cancer, castration-resistant prostate cancer, breast cancer, triple negative breast cancer, glioblastoma, ovarian cancer, lung cancer, squamous cell carcinoma (e.g., head, neck, or esophagus), colorectal cancer, leukemia, acute myeloid leukemia, lymphoma, B cell lymphoma, or multiple myeloma. Additional examples include, cancer of the thyroid, endocrine system, brain, breast, cervix, colon, head & neck, esophagus, liver, kidney, lung, non-small cell lung, melanoma, mesothelioma, ovary, sarcoma, stomach, uterus or Medulloblastoma, Hodgkin's Disease, Non-Hodgkin's Lymphoma, multiple myeloma, neuroblastoma, glioma, glioblastoma multiforme, ovarian cancer, rhabdomyosarcoma, primary thrombocytosis, primary macroglobulinemia, primary brain tumors, cancer, malignant pancreatic insulanoma, malignant carcinoid, urinary bladder cancer, premalignant skin lesions, testicular cancer, lymphomas, thyroid cancer, neuroblastoma, esophageal cancer, genitourinary tract cancer, malignant hypercalcemia, endometrial cancer, adrenal cortical cancer, neoplasms of the endocrine or exocrine pancreas, medullary thyroid cancer, medullary thyroid carcinoma, melanoma, colorectal cancer, papillary thyroid cancer, hepatocellular carcinoma, Paget's Disease of the Nipple, Phyllodes Tumors, Lobular Carcinoma, Ductal Carcinoma, cancer of the pancreatic stellate cells, cancer of the hepatic stellate cells, or prostate cancer. In some embodiments, the cancer is a solid tumor. In some embodiments, the cancer is hematological.

[1136] In embodiments, the anti-TCRβV antibody molecule, multi specific or multifunctional molecules (or pharmaceutical composition) are administered in a manner appropriate to the disease to be treated or prevented. The quantity and frequency of administration will be determined by such factors as the condition of the patient, and the type and severity of the patient's disease. Appropriate dosages may be determined by clinical trials. For example, when “an effective amount” or “a therapeutic amount” is indicated, the precise amount of the pharmaceutical composition (or multispecific or multifunctional molecules) to be administered can be determined by a physician with consideration of individual differences in tumor size, extent of infection or metastasis, age, weight, and condition of the subject. In embodiments, the pharmaceutical composition described herein can be administered at a dosage of 10⁴ to 10⁹ cells/kg body weight, e.g., 10⁵ to 10⁶ cells/kg body weight, including all integer values within those ranges. In embodiments, the pharmaceutical composition described herein can be administered multiple times at these dosages. In embodiments, the pharmaceutical composition described herein can be administered using infusion techniques described in immunotherapy (see, e.g., Rosenberg et al., New Eng. J. of Med. 319:1676, 1988).

[1137] In embodiments, the anti-TCRβV antibody molecule, multi specific or multifunctional molecules or pharmaceutical composition is administered to the subject parentally. In embodiments, the cells are administered to the subject intravenously, subcutaneously, intratumorally, intranodally, intramuscularly, intradermally, or intraperitoneally. In embodiments, the cells are administered, e.g., injected, directly into a tumor or lymph node. In embodiments, the cells are administered as an infusion (e.g., as described in Rosenberg et al., New Eng. J. of Med. 319:1676, 1988) or an intravenous push. In embodiments, the cells are administered as an injectable depot formulation.

[1138] In embodiments, the subject is a mammal. In embodiments, the subject is a human, monkey, pig, dog, cat, cow, sheep, goat, rabbit, rat, or mouse. In embodiments, the subject is a human. In embodiments, the subject is a pediatric subject, e.g., less than 18 years of age, e.g., less than 17, 16, 15, 14, 13, 12, 11, 10, 9, 8, 7, 6, 5, 4, 3, 2, 1 or less years of age. In embodiments, the subject is an adult, e.g., at least 18 years of age, e.g., at least 19, 20, 21, 22, 23, 24, 25, 25-30, 30-35, 35-40, 40-50, 50-60, 60-70, 70-80, or 80-90 years of age.

### Methods of Cancer Treatment

[1139] Methods described herein include treating a cancer in a subject by using an anti-TCRβV antibody molecule, e.g., using a pharmaceutical composition described herein. Also provided are methods for reducing or ameliorating a symptom of a cancer in a subject, as well as methods for inhibiting the growth of a cancer and/or killing one or more cancer cells. In embodiments, the methods described herein decrease the size of a tumor and/or decrease the number of cancer cells in a subject administered with a described herein or a pharmaceutical composition described herein.

[1140] Disclosed herein are methods of treating a subject having a cancer comprising acquiring a status of one or more TCRBV molecules in a subject. In some embodiments, a higher, e.g., increased, level or activity of one or more TCRβV molecules in a subject, e.g., in a sample from a subject, is indicative of a bias, e.g., a preferential expansion, e.g., clonal expansion, of T cells expressing said one or more TCRβV molecules in the subject.

[1141] Without wishing to be bound by theory, it is believed that a biased T cell population, e.g., a T cell population expressing a TCRβV molecule, is antigen-specific for a disease antigen, e.g., a cancer antigen (Wang C Y, et al., Int J Oncol. (2016) 48(6):2247-56). In some embodiments, the cancer antigen comprises a cancer associated antigen or a neoantigen. In some embodiments, a subject having a cancer, e.g., as disclosed herein, has a higher, e.g., increased, level or activity of one or more TCRβV molecules associated with the cancer. In some embodiments, the TCRβV molecule is associated with, e.g., recognizes, a cancer antigen, e.g., a cancer associated antigen or a neoantigen.

[1142] Accordingly, disclosed herein are methods of expanding an immune effector cell population obtained from a subject, comprising acquiring a status of one or more TCRβV molecules in a sample from the subject, comprising contacting said immune effector cell population with an anti-TCRβV antibody molecule disclosed herein, e.g., an anti-TCRβV antibody molecule that binds to the same TCRβV molecule that is higher, e.g., increased in the immune effector cell population in the sample from the subject. In some embodiments, contacting the population of immune effector cells (e.g., comprising T cells that express one or more TCRβV molecules) with an anti-TCRβV molecule results in expansion of the population of immune effector cells expressing one or more TCRβV molecules. In some embodiments, the expanded population, or a portion thereof, is administered to the subject (e.g., same subject from whom the immune effector cell population was obtained), to treat the cancer. In some embodiments, the expanded population, or a portion thereof, is administered to a different subject (e.g., not the same subject from whom the immune effector cell population was obtained), to treat the cancer.

[1143] Also disclosed herein, are methods of treating a subject having a cancer, comprising: acquiring a status of one or more TCRβV molecules in a sample from the subject, and determining whether the one or more TCRβV molecules is higher, e.g., increased, in a sample from the subject compared to a reference value, wherein responsive to said determination, administering to the subject an effective amount of an anti-TCRβV antibody molecule, e.g., an agonistic anti-TCRβV antibody molecule, e.g., as described herein.

[1144] In some embodiments of any of the methods or composition for use disclosed herein, the subject has B-CLL. In some embodiments, a subject having B-CLL has a higher, e.g., increased, level or activity of one or more TCRβV molecules, e.g., one or more TCRβV molecules comprising: (i) TCRβ V6 subfamily comprising, e.g., TCRβ V6-4*01, TCRβ V6-4*02, TCRβ V6-9*01, TCRβ V6-8*01, TCRβ V6-5*01, TCRβ V6-6*02, TCRβ V6-6*01, TCRβ V6-2*01, TCRβ V6-3*01 or TCRβ V6-1*01; (ii) TCRβ V5 subfamily comprising TCRβ V5-6*01, TCRβ V5-4*01, or TCRβ V5-8*01; (iii) TCRβ V3 subfamily comprising TCRβ V3-1*01; (iv) TCRβ V2 subfamily comprising TCRβ V2*01; or (v) TCRβ V19 subfamily comprising TCRβ V19*01, or TCRβ V19*02.

[1145] In some embodiments, a subject having B-CLL has a higher, e.g., increased, level or activity of a TCRβ V6 subfamily comprising, e.g., TCRβ V6-4*01, TCRβ V6-4*02, TCRβ V6-9*01, TCRβ V6-8*01, TCRβ V6-5*01, TCRβ V6-6*02, TCRβ V6-6*01, TCRβ V6-2*01, TCRβ V6-3*01 or TCRβ V6-1*01. In some embodiments, the subject is administered an anti-TCRβV molecule (e.g., an agonistic anti-TCRβV molecule as described herein) that binds to one or more members of the TCRβ V6 subfamily. In some embodiments, administration of the an anti-TCRβV molecule results in expansion of immune cells expressing one or more members of the TCRβ V6 subfamily.

[1146] In some embodiments, a subject having B-CLL has a higher, e.g., increased, level or activity of a TCRβ V5 subfamily comprising TCRβ V5-6*01, TCRβ V5-4*01, or TCRβ V5-8*01. In some embodiments, the subject is administered an anti-TCRβV molecule (e.g., an agonistic anti-TCRβV molecule as described herein) that binds to one or more members of the TCRβ V5 subfamily. In some embodiments, administration of the an anti-TCRβV molecule results in expansion of immune cells expressing one or more members of the TCRβ V5 subfamily.

[1147] In some embodiments, a subject having B-CLL has a higher, e.g., increased, level or activity of a TCRβ V3 subfamily comprising TCRβ V3-1*01. In some embodiments, the subject is administered an anti-TCRβV molecule (e.g., an agonistic anti-TCRβV molecule as described herein) that binds to one or more members of the TCRβ V3 subfamily. In some embodiments, administration of the an anti-TCRβV molecule results in expansion of immune cells expressing one or more members of the TCRβ V3 subfamily.

[1148] In some embodiments, a subject having B-CLL has a higher, e.g., increased, level or activity of a TCRβ V2 subfamily comprising TCRβ V2*01. In some embodiments, the subject is administered an anti-TCRβV molecule (e.g., an agonistic anti-TCRβV molecule as described herein) that binds to one or more members of the TCRβ V2 subfamily. In some embodiments, administration of the an anti-TCRβV molecule results in expansion of immune cells expressing one or more members of the TCRβ V2 subfamily.

[1149] In some embodiments, a subject having B-CLL has a higher, e.g., increased, level or activity of a TCRβ V19 subfamily comprising TCRβ V19*01, or TCRβ V19*02. In some embodiments, the subject is administered an anti-TCRβV molecule (e.g., an agonistic anti-TCRBV molecule as described herein) that binds to one or more members of the TCRβ V19 subfamily. In some embodiments, administration of the an anti-TCRβV molecule results in expansion of immune cells expressing one or more members of the TCRβ V19 subfamily.

[1150] In some embodiments of any of the methods or composition for use disclosed herein, the subject has melanoma. In some embodiments, a subject having melanoma has a higher, e.g., increased, level or activity of one or more TCRβV molecules, e.g., one or more TCRβV molecules comprising the TCRβ V6 subfamily comprising, e.g., TCRβ V6-4*01, TCRβ V6-4*02, TCRβ V6-9*01, TCRβ V6-8*01, TCRβ V6-5*01, TCRβ V6-6*02, TCRβ V6-6*01, TCRβ V6-2*01, TCRβ V6-3*01 or TCRβ V6-1*01. In some embodiments, the subject is administered an anti-TCRβV molecule (e.g., an agonistic anti-TCRβV molecule as described herein) that binds to one or more members of the TCRβ V6 subfamily. In some embodiments, administration of the an anti-TCRβV molecule results in expansion of immune cells expressing one or more members of the TCRβ V6 subfamily.

[1151] In some embodiments of any of the methods or composition for use disclosed herein, the subject has DLBCL. In some embodiments, a subject having melanoma has a higher, e.g., increased, level or activity of one or more TCRβV molecules, e.g., one or more TCRβV molecules comprising: (i) TCRβ V13 subfamily comprising TCRβ V13*01; (ii) TCRβ V3 subfamily comprising TCRβ V3-1*01; or (iii) TCRβ V23 subfamily.

[1152] In some embodiments, a subject having DLBCL has a higher, e.g., increased, level or activity of a TCRβ V13 subfamily comprising TCRβ V13*01. In some embodiments, the subject is administered an anti-TCRβV molecule (e.g., an agonistic anti-TCRβV molecule as described herein) that binds to one or more members of the TCRβ V13 subfamily. In some embodiments, administration of the an anti-TCRβV molecule results in expansion of immune cells expressing one or more members of the TCRβ V13 subfamily.

[1153] In some embodiments, a subject having DLBCL has a higher, e.g., increased, level or activity of a TCRβ V3 subfamily comprising TCRβ V3-1*01. In some embodiments, the subject is administered an anti-TCRβV molecule (e.g., an agonistic anti-TCRβV molecule as described herein) that binds to one or more members of the TCRβ V3 subfamily. In some embodiments, administration of the an anti-TCRβV molecule results in expansion of immune cells expressing one or more members of the TCRβ V3 subfamily.

[1154] In some embodiments, a subject having DLBCL has a higher, e.g., increased, level or activity of a TCRβ V23 subfamily. In some embodiments, the subject is administered an anti-TCRβV molecule (e.g., an agonistic anti-TCRβV molecule as described herein) that binds to one or more members of the TCRβ V23 subfamily. In some embodiments, administration of the an anti-TCRβV molecule results in expansion of immune cells expressing one or more members of the TCRβ V23 subfamily.

[1155] In some embodiments of any of the methods or composition for use disclosed herein, the subject has CRC. In some embodiments, a subject having melanoma has a higher, e.g., increased, level or activity of one or more TCRβV molecules, e.g., one or more TCRβV molecules comprising: (i) TCRβ V19 subfamily comprising TCRβ V19*01, or TCRβ V19*02; (ii) TCRβ V12 subfamily comprising TCRβ V12-4*01, TCRβ V12-3*01, or TCRβ V12-5*01; (iii) TCRβ V16 subfamily comprising TCRβ V16*01; or (iv) TCRβ V21 subfamily.

[1156] In some embodiments, a subject having CRC has a higher, e.g., increased, level or activity of a TCRβ V19 subfamily comprising TCRβ V19*01, or TCRβ V19*02. In some embodiments, the subject is administered an anti-TCRβV molecule (e.g., an agonistic anti-TCRβV molecule as described herein) that binds to one or more members of the TCRβ V19 subfamily. In some embodiments, administration of the an anti-TCRβV molecule results in expansion of immune cells expressing one or more members of the TCRβ V19 subfamily.

[1157] In some embodiments, a subject having CRC has a higher, e.g., increased, level or activity of a TCRβ V12 subfamily comprising TCRβ V12-4*01, TCRβ V12-3*01, or TCRβ V12-5*01. In some embodiments, the subject is administered an anti-TCRβV molecule (e.g., an agonistic anti-TCRβV molecule as described herein) that binds to one or more members of the TCRβ V12 subfamily. In some embodiments, administration of the an anti-TCRβV molecule results in expansion of immune cells expressing one or more members of the TCRβ V12 subfamily.

[1158] In some embodiments, a subject having CRC has a higher, e.g., increased, level or activity of a TCRβ V16 subfamily comprising TCRβ V16*01. In some embodiments, the subject is administered an anti-TCRβV molecule (e.g., an agonistic anti-TCRβV molecule as described herein) that binds to one or more members of the TCRβ V16 subfamily. In some embodiments, administration of the an anti-TCRβV molecule results in expansion of immune cells expressing one or more members of the TCRβ V16 subfamily.

[1159] In some embodiments, a subject having CRC has a higher, e.g., increased, level or activity of a TCRβ V21 subfamily. In some embodiments, the subject is administered an anti-TCRβV molecule (e.g., an agonistic anti-TCRβV molecule as described herein) that binds to one or more members of the TCRβ V21 subfamily. In some embodiments, administration of the an anti-TCRβV molecule results in expansion of immune cells expressing one or more members of the TCRβ V21 subfamily.

[1160] In some embodiments, acquiring a value for the status, e.g., presence, level and/or activity, of one or more TCRβV molecules comprises acquiring a measure of the T cell receptor (TCR) repertoire of a sample. In some embodiments, the value comprises a measure of the clonotype of a population of T cells in the sample.

[1161] In some embodiments, a value for the status of one or more TCRβV molecules is obtained, e.g., measured, using an assay described in Wang C Y, et al., Int J Oncol. (2016) 48(6):2247-56, the entire contents of which are hereby incorporated by reference.

[1162] In some embodiments, a value for the status of one or more TCRβV molecules is obtained, e.g., measured, using flow cytometry.

### Combination Therapies

[1163] The anti-TCRβV antibody molecule, multispecific or multifunctional molecules disclosed herein can be used in combination with a second therapeutic agent or procedure.

[1164] In embodiments, the anti-TCRβV antibody molecule, multispecific or multifunctional molecule and the second therapeutic agent or procedure are administered/performed after a subject has been diagnosed with a cancer, e.g., before the cancer has been eliminated from the subject. In embodiments, the anti-TCRβV antibody molecule, multispecific or multifunctional molecule and the second therapeutic agent or procedure are administered/performed simultaneously or concurrently. For example, the delivery of one treatment is still occurring when the delivery of the second commences, e.g., there is an overlap in administration of the treatments. In other embodiments, the anti-TCRβV antibody molecule, multispecific or multifunctional molecule and the second therapeutic agent or procedure are administered/performed sequentially. For example, the delivery of one treatment ceases before the delivery of the other treatment begins.

[1165] In embodiments, combination therapy can lead to more effective treatment than monotherapy with either agent alone. In embodiments, the combination of the first and second treatment is more effective (e.g., leads to a greater reduction in symptoms and/or cancer cells) than the first or second treatment alone. In embodiments, the combination therapy permits use of a lower dose of the first or the second treatment compared to the dose of the first or second treatment normally required to achieve similar effects when administered as a monotherapy. In embodiments, the combination therapy has a partially additive effect, wholly additive effect, or greater than additive effect.

[1166] In one embodiment, the anti-TCRBV antibody, multispecific or multifunctional molecule is administered in combination with a therapy, e.g., a cancer therapy (e.g., one or more of anti-cancer agents, immunotherapy, photodynamic therapy (PDT), surgery and/or radiation). The terms “chemotherapeutic,” “chemotherapeutic agent,” and “anti-cancer agent” are used interchangeably herein. The administration of the multispecific or multifunctional molecule and the therapy, e.g., the cancer therapy, can be sequential (with or without overlap) or simultaneous. Administration of the anti-TCRBV antibody, multispecific or multifunctional molecule can be continuous or intermittent during the course of therapy (e.g., cancer therapy). Certain therapies described herein can be used to treat cancers and non-cancerous diseases. For example, PDT efficacy can be enhanced in cancerous and non-cancerous conditions (e.g., tuberculosis) using the methods and compositions described herein (reviewed in, e.g., Agostinis, P. et al. (2011) CA Cancer J. Clin. 61:250-281).

### Anti-Cancer Therapies

[1167] In other embodiments, the anti-TCRβV antibody molecule, multispecific or multifunctional molecule is administered in combination with a low or small molecular weight chemotherapeutic agent. Exemplary low or small molecular weight chemotherapeutic agents include, but not limited to, 13-cis-retinoic acid (isotretinoin, ACCUTANE®), 2-CdA (2-chlorodeoxyadenosine, cladribine, LEUSTATIN™), 5-azacitidine (azacitidine, VIDAZA®), 5-fluorouracil (5-FU, fluorouracil, ADRUCIL®), 6-mercaptopurine (6-MP, mercaptopurine, PURINETHOL®), 6-TG (6-thioguanine, thioguanine, THIOGUANINE TABLOID®), abraxane (paclitaxel protein-bound), actinomycin-D (dactinomycin, COSMEGEN®), alitretinoin (PANRETIN®), all-transretinoic acid (ATRA, tretinoin, VESANOID®), altretamine (hexamethylmelamine, HMM, HEXALEN®), amethopterin (methotrexate, methotrexate sodium, MTX, TREXALL™, RHEUMATREX®), amifostine (ETHYOL®), arabinosylcytosine (Ara-C, cytarabine, CYTOSAR-U®), arsenic trioxide (TRISENOX®), asparaginase (Erwinia L-asparaginase, L-asparaginase, ELSPAR®, KIDROLASE®), BCNU (carmustine, BiCNU®), bendamustine (TREANDA®), bexarotene (TARGRETIN®), bleomycin (BLENOXANE®), busulfan (BUSULFEX®, MYLERAN®), calcium leucovorin (Citrovorum Factor, folinic acid, leucovorin), camptothecin-11 (CPT-11, irinotecan, CAMPTOSAR®), capecitabine (XELODA®), carboplatin (PARAPLATIN®), carmustine wafer (prolifeprospan 20 with carmustine implant, GLIADEL® wafer), CCI-779 (temsirolimus, TORISEL®), CCNU (lomustine, CeeNU), CDDP (cisplatin, PLATINOL®, PLATINOL-AQ®), chlorambucil (leukeran), cyclophosphamide (CYTOXAN®, NEOSAR®), dacarbazine (DIC, DTIC, imidazole carboxamide, DTIC-DOME®), daunomycin (daunorubicin, daunorubicin hydrochloride, rubidomycin hydrochloride, CERUBIDINE®), decitabine (DACOGEN®), dexrazoxane (ZINECARD®), DHAD (mitoxantrone, NOVANTRONE®), docetaxel (TAXOTERE®), doxorubicin (ADRIAMYCIN®, RUBEX®), epirubicin (ELLENCE™), estramustine (EMCYT®), etoposide (VP-16, etoposide phosphate, TOPOSAR®, VEPESID®, ETOPOPHOS®), floxuridine (FUDR®), fludarabine (FLUDARA®), fluorouracil (cream) (CARAC™, EFUDEX®, FLUOROPLEX®), gemcitabine (GEMZAR®), hydroxyurea (HYDREA®, DROXIA™, MYLOCEL™), idarubicin (IDAMYCIN®), ifosfamide (IFEX®), ixabepilone (IXEMPRA™), LCR (leurocristine, vincristine, VCR, ONCOVIN®, VINCASAR PFS®), L-PAM (L-sarcolysin, melphalan, phenylalanine mustard, ALKERAN®), mechlorethamine (mechlorethamine hydrochloride, mustine, nitrogen mustard, MUSTARGEN®), mesna (MESNEX™), mitomycin (mitomycin-C, MTC, MUTAMYCIN®), nelarabine (ARRANON®), oxaliplatin (ELOXATIN™), paclitaxel (TAXOL®, ONXAL™), pegaspargase (PEG-L-asparaginase, ONCOSPAR®), PEMETREXED (ALIMTA®), pentostatin (NIPENT®), procarbazine (MATULANE®), streptozocin (ZANOSAR®), temozolomide (TEMODAR®), teniposide (VM-26, VUMON®), TESPA (thiophosphoamide, thiotepa, TSPA, THIOPLEX®), topotecan (HYCAMTIN®), vinblastine (vinblastine sulfate, vincaleukoblastine, VLB, ALKABAN-AQ®, VELBAN®), vinorelbine (vinorelbine tartrate, NAVELBINE®), and vorinostat (ZOLINZA®).

[1168] In another embodiment, the anti-TCRβV antibody molecule, multispecific or multifunctional molecule is administered in conjunction with a biologic. Biologics useful in the treatment of cancers are known in the art and a binding molecule of the invention may be administered, for example, in conjunction with such known biologics. For example, the FDA has approved the following biologics for the treatment of breast cancer: HERCEPTIN® (trastuzumab, Genentech Inc., South San Francisco, Calif; a humanized monoclonal antibody that has anti-tumor activity in HER2-positive breast cancer); FASLODEX® (fulvestrant, AstraZeneca Pharmaceuticals, LP, Wilmington, Del.; an estrogen-receptor antagonist used to treat breast cancer); ARIMIDEX® (anastrozole, AstraZeneca Pharmaceuticals, LP; a nonsteroidal aromatase inhibitor which blocks aromatase, an enzyme needed to make estrogen); Aromasin® (exemestane, Pfizer Inc., New York, N.Y.; an irreversible, steroidal aromatase inactivator used in the treatment of breast cancer); FEMARA® (letrozole, Novartis Pharmaceuticals, East Hanover, N.J.; a nonsteroidal aromatase inhibitor approved by the FDA to treat breast cancer); and NOLVADEX® (tamoxifen, AstraZeneca Pharmaceuticals, LP; a nonsteroidal antiestrogen approved by the FDA to treat breast cancer). Other biologics with which the binding molecules of the invention may be combined include: AVASTIN® (bevacizumab, Genentech Inc.; the first FDA-approved therapy designed to inhibit angiogenesis); and ZEVALIN® (ibritumomab tiuxetan, Biogen Idec, Cambridge, Mass.; a radiolabeled monoclonal antibody currently approved for the treatment of B-cell lymphomas).

[1169] In addition, the FDA has approved the following biologics for the treatment of colorectal cancer: AVASTIN®; ERBITUX® (cetuximab, ImClone Systems Inc., New York, N.Y., and Bristol-Myers Squibb, New York, N.Y.; is a monoclonal antibody directed against the epidermal growth factor receptor (EGFR)); GLEEVEC® (imatinib mesylate; a protein kinase inhibitor); and ERGAMISOL® (levamisole hydrochloride, Janssen Pharmaceutica Products, LP, Titusville, N.J.; an immunomodulator approved by the FDA in 1990 as an adjuvant treatment in combination with 5-fluorouracil after surgical resection in patients with Dukes' Stage C colon cancer).

[1170] For the treatment of lung cancer, exemplary biologics include TARCEVA® (erlotinib HCL, OSI Pharmaceuticals Inc., Melville, N.Y.; a small molecule designed to target the human epidermal growth factor receptor 1 (HER1) pathway).

[1171] For the treatment of multiple myeloma, exemplary biologics include VELCADE® (bortezomib, Millennium Pharmaceuticals, Cambridge Mass.; a proteasome inhibitor). Additional biologics include THALIDOMID® (thalidomide, Clegene Corporation, Warren, N.J.; an immunomodulatory agent and appears to have multiple actions, including the ability to inhibit the growth and survival of myeloma cells and anti-angiogenesis).

[1172] Additional exemplary cancer therapeutic antibodies include, but are not limited to, 3F8, abagovomab, adecatumumab, afutuzumab, alacizumab pegol, alemtuzumab (CAMPATH®, MABCAMPATH®), altumomab pentetate (HYBRI-CEAKER®), anatumomab mafenatox, anrukinzumab (IMA-638), apolizumab, arcitumomab (CEA-SCAN®), bavituximab, bectumomab (LYMPHOSCAN®), belimumab (BENLYSTA®, LYMPHOSTAT-B®), besilesomab (SCINTIMUN®), bevacizumab (AVASTIN®), bivatuzumab mertansine, blinatumomab, brentuximab vedotin, cantuzumab mertansine, capromab pendetide (PROSTASCINT®), catumaxomab (REMOVAB®), CC49, cetuximab (C225, ERBITUX®), citatuzumab bogatox, cixutumumab, clivatuzumab tetraxetan, conatumumab, dacetuzumab, denosumab (PROLIA®), detumomab, ecromeximab, edrecolomab (PANOREX®), elotuzumab, epitumomab cituxetan, epratuzumab, ertumaxomab (REXOMUN®), etaracizumab, farletuzumab, figitumumab, fresolimumab, galiximab, gemtuzumab ozogamicin (MYLOTARG®), girentuximab, glembatumumab vedotin, ibritumomab (ibritumomab tiuxetan, ZEVALIN®), igovomab (INDIMACIS-125®), intetumumab, inotuzumab ozogamicin, ipilimumab, iratumumab, labetuzumab (CEA-CIDE®), lexatumumab, lintuzumab, lucatumumab, lumiliximab, mapatumumab, matuzumab, milatuzumab, minretumomab, mitumomab, nacolomab tafenatox, naptumomab estafenatox, necitumumab, nimotuzumab (THERACIM®, THERALOC®), nofetumomab merpentan (VERLUMA®), ofatumumab (ARZERRA®), olaratumab, oportuzumab monatox, oregovomab (OVAREX®), panitumumab (VECTIBIX®), pemtumomab (THERAGYN®), pertuzumab (OMNITARG®), pintumomab, pritumumab, ramucirumab, ranibizumab (LUCENTIS®), rilotumumab, rituximab (MABTHERA®, RITUXAN®), robatumumab, satumomab pendetide, sibrotuzumab, siltuximab, sontuzumab, tacatuzumab tetraxetan (AFP-CIDE®), taplitumomab paptox, tenatumomab, TGN1412, ticilimumab (tremelimumab), tigatuzumab, TNX-650, tositumomab (BEXXAR®), trastuzumab (HERCEPTIN®), tremelimumab, tucotuzumab celmoleukin, veltuzumab, volociximab, votumumab (HUMASPECT®), zalutumumab (HUMAX-EGFR®), and zanolimumab (HUMAX-CD4®).

[1173] In other embodiments, the anti-TCRβV antibody molecule, multispecific or multifunctional molecule is administered in combination with a viral cancer therapeutic agent. Exemplary viral cancer therapeutic agents include, but not limited to, vaccinia virus (vvDD-CDSR), carcinoembryonic antigen-expressing measles virus, recombinant vaccinia virus (TK-deletion plus GM-CSF), Seneca Valley virus-001, Newcastle virus, coxsackie virus A21, GL-ONC1, EBNA1 C-terminal/LMP2 chimeric protein-expressing recombinant modified vaccinia Ankara vaccine, carcinoembryonic antigen-expressing measles virus, G207 oncolytic virus, modified vaccinia virus Ankara vaccine expressing p53, OncoVEX GM-CSF modified herpes-simplex 1 virus, fowlpox virus vaccine vector, recombinant vaccinia prostate-specific antigen vaccine, human papillomavirus 16/18 L1 virus-like particle/AS04 vaccine, MVA-EBNA1/LMP2 Inj. vaccine, quadrivalent HPV vaccine, quadrivalent human papillomavirus (types 6, 11, 16, 18) recombinant vaccine (GARDASIL®), recombinant fowlpox-CEA(6D)/TRICOM vaccine; recombinant vaccinia-CEA(6D)-TRICOM vaccine, recombinant modified vaccinia Ankara-5T4 vaccine, recombinant fowlpox-TRICOM vaccine, oncolytic herpes virus NV1020, HPV L1 VLP vaccine V504, human papillomavirus bivalent (types 16 and 18) vaccine (CERVARIX®), herpes simplex virus HF10, Ad5CMV-p53 gene, recombinant vaccinia DF3/MUC1 vaccine, recombinant vaccinia-MUC-1 vaccine, recombinant vaccinia-TRICOM vaccine, ALVAC MART-1 vaccine, replication-defective herpes simplex virus type I (HSV-1) vector expressing human Preproenkephalin (NP2), wild-type reovirus, reovirus type 3 Dearing (REOLYSIN®), oncolytic virus HSV1716, recombinant modified vaccinia Ankara (MVA)-based vaccine encoding Epstein-Barr virus target antigens, recombinant fowlpox-prostate specific antigen vaccine, recombinant vaccinia prostate-specific antigen vaccine, recombinant vaccinia-B7.1 vaccine, rAd-p53 gene, Ad5-delta24RGD, HPV vaccine 580299, JX-594 (thymidine kinase-deleted vaccinia virus plus GM-CSF), HPV-16/18 L1/AS04, fowlpox virus vaccine vector, vaccinia-tyrosinase vaccine, MEDI-517 HPV-16/18 VLP AS04 vaccine, adenoviral vector containing the thymidine kinase of herpes simplex virus TK99UN, HspE7, FP253/Fludarabine, ALVAC(2) melanoma multi-antigen therapeutic vaccine, ALVAC-hB7.1, canarypox-hIL-12 melanoma vaccine, Ad-REIC/Dkk-3, rAd-IFN SCH 721015, TIL-Ad-INFg, Ad-ISF35, and coxsackievirus A21 (CVA21, CAVATAK®).

[1174] In other embodiments, anti-TCRβV antibody molecule, multispecific or multifunctional molecule is administered in combination with a nanopharmaceutical. Exemplary cancer nanopharmaceuticals include, but not limited to, ABRAXANE® (paclitaxel bound albumin nanoparticles), CRLX101 (CPT conjugated to a linear cyclodextrin-based polymer), CRLX288 (conjugating docetaxel to the biodegradable polymer poly (lactic-co-glycolic acid)), cytarabine liposomal (liposomal Ara-C, DEPOCYT™), daunorubicin liposomal (DAUNOXOME®), doxorubicin liposomal (DOXIL®, CAELYX®), encapsulated-daunorubicin citrate liposome (DAUNOXOME®), and PEG anti-VEGF aptamer (MACUGEN®).

[1175] In some embodiments, the anti-TCRβV antibody molecule, multispecific or multifunctional molecule is administered in combination with paclitaxel or a paclitaxel formulation, e.g., TAXOL®, protein-bound paclitaxel (e.g., ABRAXANE®). Exemplary paclitaxel formulations include, but are not limited to, nanoparticle albumin-bound paclitaxel (ABRAXANE®, marketed by Abraxis Bioscience), docosahexaenoic acid bound-paclitaxel (DHA-paclitaxel, Taxoprexin, marketed by Protarga), polyglutamate bound-paclitaxel (PG-paclitaxel, paclitaxel poliglumex, CT-2103, XYOTAX, marketed by Cell Therapeutic), the tumor-activated prodrug (TAP), ANG105 (Angiopep-2 bound to three molecules of paclitaxel, marketed by ImmunoGen), paclitaxel-EC-1 (paclitaxel bound to the erbB2-recognizing peptide EC-1; see Li et al., Biopolymers (2007) 87:225-230), and glucose-conjugated paclitaxel (e.g., 2′-paclitaxel methyl 2-glucopyranosyl succinate, see Liu et al., Bioorganic & Medicinal Chemistry Letters (2007) 17:617-620).

[1176] Exemplary RNAi and antisense RNA agents for treating cancer include, but not limited to, CALAA-01, siG12D LODER (Local Drug EluteR), and ALN-VSP02.

[1177] Other cancer therapeutic agents include, but not limited to, cytokines (e.g., aldesleukin (IL-2, Interleukin-2, PROLEUKIN®), alpha Interferon (IFN-alpha, Interferon alfa, INTRON® A (Interferon alfa-2b), ROFERON-A® (Interferon alfa-2a)), Epoetin alfa (PROCRIT®), filgrastim (G-CSF, Granulocyte-Colony Stimulating Factor, NEUPOGEN®), GM-CSF (Granulocyte Macrophage Colony Stimulating Factor, sargramostim, LEUKINE™), IL-11 (Interleukin-11, oprelvekin, NEUMEGA®), Interferon alfa-2b (PEG conjugate) (PEG interferon, PEG-INTRON™), and pegfilgrastim (NEULASTA™)), hormone therapy agents (e.g., aminoglutethimide (CYTADREN®), anastrozole (ARIMIDEX®), bicalutamide (CASODEX®), exemestane (AROMASIN®), fluoxymesterone (HALOTESTIN®), flutamide (EULEXIN®), fulvestrant (FASLODEX®), goserelin (ZOLADEX®), letrozole (FEMARA®), leuprolide (ELIGARD™ LUPRON®, LUPRON DEPOT®, VIADUR™), megestrol (megestrol acetate, MEGACE®), nilutamide (ANANDRON®, NILANDRON®), octreotide (octreotide acetate, SANDOSTATIN®, SANDOSTATIN LAR®), raloxifene (EVISTA®), romiplostim (NPLATE®), tamoxifen (NOVALDEX®), and toremifene (FARESTON®)), phospholipase A2 inhibitors (e.g., anagrelide (AGRYLIN®)), biologic response modifiers (e.g., BCG (THERACYS®, TICE®), and Darbepoetin alfa (ARANESP®)), target therapy agents (e.g., bortezomib (VELCADE®), dasatinib (SPRYCEL™), denileukin diftitox (ONTAK®), erlotinib (TARCEVA®), everolimus (AFINITOR®), gefitinib (IRESSA®), imatinib mesylate (STI-571, GLEEVEC™), lapatinib (TYKERB®), sorafenib (NEXAVAR®), and SU11248 (sunitinib, SUTENT®)), immunomodulatory and antiangiogenic agents (e.g., CC-5013 (lenalidomide, REVLIMID®), and thalidomide (THALOMID®)), glucocorticosteroids (e.g., cortisone (hydrocortisone, hydrocortisone sodium phosphate, hydrocortisone sodium succinate, ALA-CORT®, HYDROCORT ACETATE®, hydrocortone phosphate LANACORT®, SOLU-CORTEF®), decadron (dexamethasone, dexamethasone acetate, dexamethasone sodium phosphate, DEXASONE®, DIODEX®, HEXADROL®, MAXIDEX®), methylprednisolone (6-methylprednisolone, methylprednisolone acetate, methylprednisolone sodium succinate, DURALONE®, MEDRALONE®, MEDROL®, M-PREDNISOL®, SOLU-MEDROL®), prednisolone (DELTA-CORTEF®, ORAPRED®, PEDIAPRED®, PRELONE®), and prednisone (DELTASONE®, LIQUID PRED®, METICORTEN®, ORASONE®)), and bisphosphonates (e.g., pamidronate (AREDIA®), and zoledronic acid (ZOMETA®))

[1178] In some embodiments, the anti-TCRβV antibody molecule, multispecific or multifunctional molecule is used in combination with a tyrosine kinase inhibitor (e.g., a receptor tyrosine kinase (RTK) inhibitor). Exemplary tyrosine kinase inhibitor include, but are not limited to, an epidermal growth factor (EGF) pathway inhibitor (e.g., an epidermal growth factor receptor (EGFR) inhibitor), a vascular endothelial growth factor (VEGF) pathway inhibitor (e.g., an antibody against VEGF, a VEGF trap, a vascular endothelial growth factor receptor (VEGFR) inhibitor (e.g., a VEGFR-1 inhibitor, a VEGFR-2 inhibitor, a VEGFR-3 inhibitor)), a platelet derived growth factor (PDGF) pathway inhibitor (e.g., a platelet derived growth factor receptor (PDGFR) inhibitor (e.g., a PDGFR-β inhibitor)), a RAF-1 inhibitor, a KIT inhibitor and a RET inhibitor. In some embodiments, the anti-cancer agent used in combination with the AHCM agent is selected from the group consisting of: axitinib (AG013736), bosutinib (SKI-606), cediranib (RECENTIN™, AZD2171), dasatinib (SPRYCEL®, BMS-354825), erlotinib (TARCEVA®), gefitinib (IRESSA®), imatinib (Gleevec®, CGP57148B, STI-571), lapatinib (TYKERB®, TYVERB®), lestaurtinib (CEP-701), neratinib (HKI-272), nilotinib (TASIGNA®), semaxanib (semaxinib, SU5416), sunitinib (SUTENT®, SU11248), toceranib (PALLADIA®), vandetanib (ZACTIMA®, ZD6474), vatalanib (PTK787, PTK/ZK), trastuzumab (HERCEPTIN®), bevacizumab (AVASTIN®), rituximab (RITUXAN®), cetuximab (ERBITUX®), panitumumab (VECTIBIX®), ranibizumab (Lucentis®), nilotinib (TASIGNA®), sorafenib (NEXAVAR®), alemtuzumab (CAMPATH®), gemtuzumab ozogamicin (MYLOTARG®), ENMD-2076, PCI-32765, AC220, dovitinib lactate (TKI258, CHIR-258), BMW 2992 (TOVOK™), SGX523, PF-04217903, PF-02341066, PF-299804, BMS-777607, ABT-869, MP470, BIM 1120 (VARGATEF®), AP24534, JNJ-26483327, MGCD265, DCC-2036, BMS-690154, CEP-11981, tivozanib (AV-951), OSI-930, MM-121, XL-184, XL-647, XL228, AEE788, AG-490, AST-6, BMS-599626, CUDC-101, PD153035, pelitinib (EKB-569), vandetanib (zactima), WZ3146, WZ4002, WZ8040, ABT-869 (linifanib), AEE788, AP24534 (ponatinib), AV-951 (tivozanib), axitinib, BAY 73-4506 (regorafenib), brivanib alaninate (BMS-582664), brivanib (BMS-540215), cediranib (AZD2171), CHIR-258 (dovitinib), CP 673451, CYC116, E7080, Ki8751, masitinib (AB1010), MGCD-265, motesanib diphosphate (AMG-706), MP-470, OSI-930, Pazopanib Hydrochloride, PD173074, Sorafenib Tosylate (Bay 43-9006), SU 5402, TSU-68 (SU6668), vatalanib, XL880 (GSK1363089, EXEL-2880). Selected tyrosine kinase inhibitors are chosen from sunitinib, erlotinib, gefitinib, or sorafenib. In one embodiment, the tyrosine kinase inhibitor is sunitinib.

[1179] In one embodiment, the anti-TCRβV antibody molecule, multispecific or multifunctional molecule is administered in combination with one of more of: an anti-angiogenic agent, or a vascular targeting agent or a vascular disrupting agent. Exemplary anti-angiogenic agents include, but are not limited to, VEGF inhibitors (e.g., anti-VEGF antibodies (e.g., bevacizumab); VEGF receptor inhibitors (e.g., itraconazole); inhibitors of cell proliferatin and/or migration of endothelial cells (e.g., carboxyamidotriazole, TNP-470); inhibitors of angiogenesis stimulators (e.g., suramin), among others. A vascular-targeting agent (VTA) or vascular disrupting agent (VDA) is designed to damage the vasculature (blood vessels) of cancer tumors causing central necrosis (reviewed in, e.g., Thorpe, P.E. (2004) Clin. Cancer Res. Vol. 10:415-427). VTAs can be small-molecule. Exemplary small-molecule VTAs include, but are not limited to, microtubule destabilizing drugs (e.g., combretastatin A-4 disodium phosphate (CA4P), ZD6126, AVE8062, Oxi 4503); and vadimezan (ASA404).

[1180] Immune Checkpoint Inhibitors

[1181] In other embodiments, methods described herein comprise use of an immune checkpoint inhibitor in combination with the anti-TCRβV antibody molecule, multispecific or multifunctional molecule. The methods can be used in a therapeutic protocol in vivo.

[1182] In embodiments, an immune checkpoint inhibitor inhibits a checkpoint molecule. Exemplary checkpoint molecules include but are not limited to CTLA4, PD1, PD-L1, PD-L2, TIM3, LAG3, CD160, 2B4, CD80, CD86, B7-H3 (CD276), B7-H4 (VTCN1), HVEM (TNFRSF14 or CD270), BTLA, KIR, MHC class I, MHC class II, GALS, VISTA, BTLA, TIGIT, LAIR1, and A2aR. See, e.g., Pardoll. Nat. Rev. Cancer 12.4(2012):252-64, incorporated herein by reference.

[1183] In embodiments, the immune checkpoint inhibitor is a PD-1 inhibitor, e.g., an anti-PD-1 antibody such as Nivolumab, Pembrolizumab or Pidilizumab. Nivolumab (also called MDX-1106, MDX-1106-04, ONO-4538, or BMS-936558) is a fully human IgG4 monoclonal antibody that specifically inhibits PD1. See, e.g., U.S. Pat. No. 8,008,449 and WO2006/121168. Pembrolizumab (also called Lambrolizumab, MK-3475, MK03475, SCH-900475 or KEYTRUDA®; Merck) is a humanized IgG4 monoclonal antibody that binds to PD-1. See, e.g., Hamid, O. et al. (2013) New England Journal of Medicine 369 (2): 134-44, U.S. Pat. No. 8,354,509 and WO2009/114335. Pidilizumab (also called CT-011 or Cure Tech) is a humanized IgG1k monoclonal antibody that binds to PD1. See, e.g., WO2009/101611. In one embodiment, the inhibitor of PD-1 is an antibody molecule having a sequence substantially identical or similar thereto, e.g., a sequence at least 85%, 90%, 95% identical or higher to the sequence of Nivolumab, Pembrolizumab or Pidilizumab. Additional anti-PD1 antibodies, e.g., AMP 514 (Amplimmune), are described, e.g., in U.S. Pat. No. 8,609,089, US 2010028330, and/or US 20120114649.

[1184] In some embodiments, the PD-1 inhibitor is an immunoadhesin, e.g., an immunoadhesin comprising an extracellular/PD-1 binding portion of a PD-1 ligand (e.g., PD-L1 or PD-L2) that is fused to a constant region (e.g., an Fc region of an immunoglobulin). In embodiments, the PD-1 inhibitor is AMP-224 (B7-DCIg, e.g., described in WO2011/066342 and WO2010/027827), a PD-L2 Fc fusion soluble receptor that blocks the interaction between B7-H1 and PD-1.

[1185] In embodiments, the immune checkpoint inhibitor is a PD-L1 inhibitor, e.g., an antibody molecule. In some embodiments, the PD-L1 inhibitor is YW243.55.570, MPDL3280A, MEDI-4736, MSB-0010718C, or MDX-1105. In some embodiments, the anti-PD-L1 antibody is MSB0010718C (also called A09-246-2; Merck Serono), which is a monoclonal antibody that binds to PD-L1. Exemplary humanized anti-PD-L1 antibodies are described, e.g., in WO2013/079174. In one embodiment, the PD-L1 inhibitor is an anti-PD-L1 antibody, e.g., YW243.55.570. The YW243.55.570 antibody is described, e.g., in WO 2010/077634. In one embodiment, the PD-L1 inhibitor is MDX-1105 (also called BMS-936559), which is described, e.g., in WO2007/005874. In one embodiment, the PD-L1 inhibitor is MDPL3280A (Genentech/Roche), which is a human Fc-optimized IgG1 monoclonal antibody against PD-L1. See, e.g., U.S. Pat. No. 7,943,743 and U.S Publication No.: 20120039906. In one embodiment, the inhibitor of PD-L1 is an antibody molecule having a sequence substantially identical or similar thereto, e.g., a sequence at least 85%, 90%, 95% identical or higher to the sequence of YW243.55.570, MPDL3280A, MEDI-4736, MSB-0010718C, or MDX-1105.

[1186] In embodiments, the immune checkpoint inhibitor is a PD-L2 inhibitor, e.g., AMP-224 (which is a PD-L2 Fc fusion soluble receptor that blocks the interaction between PD1 and B7-H1. See, e.g., WO2010/027827 and WO2011/066342.

[1187] In one embodiment, the immune checkpoint inhibitor is a LAG-3 inhibitor, e.g., an anti LAG-3 antibody molecule. In embodiments, the anti-LAG-3 antibody is BMS-986016 (also called BMS986016; Bristol-Myers Squibb). BMS-986016 and other humanized anti-LAG-3 antibodies are described, e.g., in US 2011/0150892, WO2010/019570, and WO2014/008218.

[1188] In embodiments, the immune checkpoint inhibitor is a TIM-3 inhibitor, e.g., anti-TIM3 antibody molecule, e.g., described in U.S. Pat. No. 8,552,156, WO 2011/155607, EP 2581113 and U.S Publication No.: 2014/044728.

[1189] In embodiments, the immune checkpoint inhibitor is a CTLA-4 inhibitor, e.g., anti-CTLA-4 antibody molecule. Exemplary anti-CTLA4 antibodies include Tremelimumab (IgG2 monoclonal antibody from Pfizer, formerly known as ticilimumab, CP-675,206); and Ipilimumab (also called MDX-010, CAS No. 477202-00-9). Other exemplary anti-CTLA-4 antibodies are described, e.g., in U.S. Pat. No. 5,811,097.

### CRS Grading

[1190] In some embodiments, CRS can be graded in severity from 1-5 as follows. Grades 1-3 are less than severe CRS. Grades 4-5 are severe CRS. For Grade 1 CRS, only symptomatic treatment is needed (e.g., nausea, fever, fatigue, myalgias, malaise, headache) and symptoms are not life threatening. For Grade 2 CRS, the symptoms require moderate intervention and generally respond to moderate intervention. Subjects having Grade 2 CRS develop hypotension that is responsive to either fluids or one low-dose vasopressor; or they develop grade 2 organ toxicity or mild respiratory symptoms that are responsive to low flow oxygen (<40% oxygen). In Grade 3 CRS subjects, hypotension generally cannot be reversed by fluid therapy or one low-dose vasopressor. These subjects generally require more than low flow oxygen and have grade 3 organ toxicity (e.g., renal or cardiac dysfunction or coagulopathy) and/or grade 4 transaminitis. Grade 3 CRS subjects require more aggressive intervention, e.g., oxygen of 40% or higher, high dose vasopressor(s), and/or multiple vasopressors. Grade 4 CRS subjects suffer from immediately life-threatening symptoms, including grade 4 organ toxicity or a need for mechanical ventilation. Grade 4 CRS subjects generally do not have transaminitis. In Grade 5 CRS subjects, the toxicity causes death. Sets of criteria for grading CRS are provided herein as Table 5, Table 6, and Table 7. Unless otherwise specified, CRS as used herein refers to CRS according to the criteria of Table 6.

[1191] In embodiments, CRS is graded according to Table 5:

TABLE 5
CRS grading

| | |
|---|---|
| Gr1 | Supportive care only |
| Gr2 | IV therapies +/− hospitalization. |
| Gr3 | Hypotension requiring IV fluids or low-dose |
| | vasoactives or hypoxemia requiring oxygen, |
| | CPAP, or BIPAP. |
| Gr4 | Hypotension requiring high-dose vasoactives |
| | or hypoxemia requiring mechanical ventilation. |
| Gr 5 | Death |

TABLE 6
CTCAE v 4.0 CRS grading scale

| CRS grade | Characteristics |
|---|---|
| Grade 1 | Mild; No infusion interruption; No intervention |
| Grade 2 | Infusion interruption indicated but responds promptly |
| | to symptomatic treatment (e.g., antihistamines, NSAIDS, |
| | narcotics, IV fluids); prophylactic medications indicated |
| | for <=24 hrs |
| Grade 3 | Prolonged (e.g., not rapidly responsive to symptomatic |
| | medications and/or brief interruption of infusion); |
| | recurrence of symptoms following initial improvement; |
| | hospitalization indicated for clinical sequelae |
| | (e.g., renal impairment, pulmonary infiltrates) |
| Grade 4 | Life threatening consequences; pressor or ventilator support |

TABLE 7
NCI CRS grading scale

| CRS grade | Characteristics |
|---|---|
| Grade 1 | Symptoms are not life threatening and require |
| | symptomatic treatment only; e.g., fever, nausea, |
| | fatigue, headache, myalgias, malaise |
| Grade 2 | Symptoms require and respond to moderate intervention; |
| | Oxygen requirement <40% or hypotension responsive |
| | to fluids or low dose pressors or Grade 2 organ toxicity |
| Grade 3 | Symptoms require and respond to aggressive intervention; |
| | Oxygen requirement >=40% or Hypotension requiring |
| | high dose or multiple pressors or grade 3 organ toxicity or |
| | grade 4 transaminitis |
| Grade 4 | Life threatening symptoms Requirement for ventilator |
| | support or Grade 4; organ toxicity (excluding transaminitis) |

### EXAMPLES

### Example 1. Humanization of α-TRBV6-5 Antibody Clone Antibody A

[1192] The germline for the mouse α-TCRI3 antibody clone Antibody A VH and VL were assigned using IMGT nomenclature, with CDR regions defined by a combined Kabat and Chothia classification. SEQ ID NO: 1 and SEQ ID NO: 2 are the Antibody A VH and VL sequences respectively where the VH germline is mouse IGHV1S12*01 and the VL germline is mouse IGKV6-15*01. SEQ ID NOs: 3-5 are the Antibody A VH CDR regions 1-3 respectively and SEQ ID NOs: 6-8 correspond to the VL CDR regions 1-3 (as described in Table 1).

[1193] Humanization of the Antibody A VH and VL sequences was done separately using similar methodology. Amino acids positions were identified in the framework regions which were important for the success of CDR grafting. Human germline sequences were identified which preserved the necessary residues and contained a high amount of overall identity. When the human germline framework sequence did not contain a matching important amino acid, it was back mutated to match the mouse sequence. CDR regions were grafted onto the human germline unchanged. The Antibody A VH was humanized into human IGHV1-69*01 and the Antibody A VL was humanized into IGKV1-17*01 and IGKV1-27*01. All 3 humanized sequences were confirmed to contain no introduced potential negative post translational modification sites such as NG, DG, NS, NN, DS, NT, NXS, or NXT as a result of the humanization process. SEQ ID NO: 9 is the humanized Antibody A-H.1 VH and SEQ ID NOs: 10 and 11 are the humanized VL IGKV1-17*01 and IGKV1-27*01 germlines respectively (as described in Table 1). FIGS. 1A and 1B show the murine and humanized sequences with annotations depicting the CDR and framework regions (FR).

### Example 2: Humanization of α-TRBV12-3 and TRBV12-4 Antibody Clone Antibody B

[1194] The germline for the mouse α-TCRβ antibody clone Antibody B VH and VL were assigned using IMGT nomenclature, with CDR regions defined by a combined Kabat and Chothia classification. SEQ ID NO: 15 and SEQ ID NO: 16 are the Antibody B VH and VL sequences respectively where the VH germline is mouse IGHV5-17*02 and the VL germline is mouse IGKV4-50*01. SEQ ID NOs: 17-19 are the B-H VH CDR regions 1-3 respectively and SEQ ID NOs: 20-22 are the B-H VL CDR regions 1-3 (as described in Table 2).

[1195] The method applied to humanize Antibody A described in Example 1 was used to humanize Antibody B. The Antibody B VH was humanized into human IGHV3-30*01, IGHV3-48*01, and IGHV3-66*01 and the Antibody B VL was humanized into human IGKV1-9*01, IGKV1-39*01, IGKV3-15*01, IGLV1-47*01 and IGLV3-10*01. SEQ ID NOs: 23-25 are the B-H.1A, B-H.1B, and B-H.1C humanized heavy chains and SEQ ID NOs: 26-30 are the B-H.1D, B-H.1E, B-H.1F, B-H.1G and B-H.1H humanized light chains (as described in Table 2). FIGS. 2A and 2B show the murine and humanized sequences with annotations depicting the CDR and framework regions (FR).

### Example 3: Characteristics of Anti-TcrβV Antibodies

[1196] Introduction

[1197] Current bispecific constructs designed to redirect T cells to promote tumor cell lysis for cancer immunotherapy typically utilize single chain variable fragments (scFvs) that are derived from monoclonal antibodies (mAb) directed against the CD3e subunit of the T cell receptor (TCR). However, there are limitations to this approach which may prevent the full realization of the therapeutic potential for such bispecific constructs. Previous studies have shown that, e.g., low “activating” doses of anti-CD3e mAb can cause long-term T cell dysfunction and exert immunosuppressive effects. In addition, anti-CD3e mAbs bind to all T cells and thus activate equally all T cells, which has been associated with the first dose side effects of anti-CD3e mAbs that result from massive T cell activation. These large number of activated T cells secrete substantial amounts of cytokines, the most important of which is Interferon gamma (IFNg). This excess amount of IFNg in turn, e.g., activates macrophages which then can overproduce proinflammatory cytokines such as IL-1, IL-6 and TNF-alpha, causing a “cytokine storm” known as the cytokine release syndrome (CRS). Thus, it might be advantageous to develop antibodies that are capable of binding and activating only a subset of necessary effector T cells to reduce the CRS.

[1198] Results

[1199] To that end, antibodies directed to the variable chain of the beta subunit of TCR (TCR Vb) were identified. These anti-TCR Vb antibodies bind and activate a subset of T cells, but with, e.g., no or markedly reduced CRS. Using plate-bound anti-TCR Vb13.1 mAbs (A-H.1 and A-H.2) it was shown that a population of T cells, defined by positive staining with A-H.1, can be expanded (from −5% of T cells on day 0 to almost 60% of total T cells on day 6 of cell culture) (FIGS. 4A-4C). For this experiment, human CD3+ T cells were isolated using magnetic-bead separation (negative selection) and activated with immobilized (plate-coated) A-H.1 or OKT3 (anti-CD3e) antibodies at 100 nM for 6 days. The expanded Vb13.1+ T cells display cytolytic activity against transformed cell line RPMI-8226 when co-cultured with purified CD3+ T cells (FIGS. 5A-5B).

[1200] Next, the ability of PBMCs activated by anti-TCR VB antibodies to produce cytokines was assessed. The cytokine production of PBMCs activated with anti-TCR VB antibodies was compared to the cytokine production of PBMCs activated with: (i) anti-CD3e antibodies (OKT3 or SP34-2); (ii) anti-TCR V alpha (TCR VA) antibodies including anti-TCR VA 12.1 antibody 6D6.6, anti-TCR VA24JA18 antibody 6B11; (iii) anti-TCR alpha beta antibody T10B9; and/or (iv) isotype control (BGM0109). The anti-TCR VB antibodies tested include: humanized anti-TCRVB 13.1 antibodies (A-H.1, or A-H.2), murine anti-TCR VB5 antibody Antibody E, murine anti-TCR VB8.1 antibody Antibody B, and murine anti-TCR VB12 antibody Antibody D. BGM0109 comprises the amino acid sequence of

(SEQ ID NO: 3282)
METDTLLLWVLLLWVPGSTGGLNDIFEAQKIEWHE
GGGGSEPRTDTDTCPNPPDPCPTCPTPDLLGGPSV
FIFPPKPKDVLMISLTPKITCVVVDVSEEEPDVQF
NWYVNNVEDKTAQTETRQRQYNSTYRVVSVLPIKH
QDWMSGKVFKCKVNNNALPSPIEKTISKPRGQVRV
PQIYTFPPPIEQTVKKDVSVTCLVTGFLPQDIHVE
WESNGQPQPEQNYKNTQPVLDSDGSYFLYSKLNVP
KSRWDQGDSFTCSVIHEALHNHHMTKTISRSLGNG
GGGS.

[1201] As shown in FIG. 6A, when plate-bound A-H.1 or A-H.2, or anti-CD3e antibodies (OKT3 or SP34-2) were used to activate human PBMCs, the T cell cytokine IFNg was induced (FIG. 6A). All anti-TCR VB antibodies tested had a similar effect on the production of IFNg (FIG. 6B). The anti-TCR VA antibodies did not induce similar IFNg production.

[1202] With respect to IL-2 production, PBMCs activated with A-H.1 and A-H.2 resulted in increased IL-2 production (FIG. 7A) with delayed kinetics (FIG. 7B) as compared to PBMCs activated with anti-CD3e antibodies (OKT3 or SP34-2). FIG. 7B shows that anti-TCR VB antibody activated PBMCs demonstrate peak production of IL-2 at Day 5 or Day 6 post-activation (incubation with plate-coated antibodies). In contrast, IL-2 production in PBMCs activated with OKT3 peaked at day 2 post-activation. As with IFNG, the IL-2 effect (e.g., enhanced production of IL-2 and delayed kinetics) was similar across all anti-TCR VB antibodies tested (FIG. 7B).

[1203] The production of cytokines IL-6, IL-10 and TNF-alpha which are associated with “cytokine storms” (and accordingly CRS) was also assessed under similar conditions. FIGS. 8A, 9A and 10A shows that while PBMCs activated with anti-CD3e antibodies demonstrate production of IL-6 (FIG. 8A), TNF-alpha (FIG. 9A) and IL-10 (FIG. 10A), no or little induction of these cytokines was observed with PBMCs activated with A-H.1 or A-H.2. As shown in FIGS. 9B and 10B, TNF-alpha and IL-10 production was not induced by activation of PBMCs with any of the anti-TCR VB antibodies.

[1204] It was further noted that the kinetics of IFNg production by A-H.1-activated CD3+ T cells was delayed relative to those produced by CD3+ T cells activated by anti-CD3e mAbs (OKT3 and SP34-2) (FIGS. 11A and 11B).

[1205] Finally, it was observed that the subset of memory effector T cells known as TEMRA was preferentially expanded in CD8+ T cells activated by A-H.1 or A-H.2 (FIG. 12). Isolated human PBMCs were activated with immobilized (plate-coated) anti-CD3e or anti-TCR V1313.1 at 100 nM for 6-days. After a 6-day incubation, T-cell subsets were identified by FACS staining for surface markers for Naive T cell (CD8+, CD95−, CD45RA+, CCR7+), T stem cell memory (TSCM; CD8+, CD95+, CD45RA+, CCR7+), T central memory (Tcm; CD8+, CD95+, CD45RA−, CCR7+), T effector memory (Tem; CD8+, CD95+, CD45RA−, CCR7−), and T effector memory re-expressing CD45RA (Temra; CD8+, CD95+, CD45RA+, CCR7−). Human PBMCs activated by anti-TCR V1313.1 antibodies (A-H.1 or A-H.2) increased CD8+ TSCM and Temra T cell subsets when compared to PBMCs activated by anti-CD3e antibodies (OKT3 or SP34-2). Similar expansion was observed with CD4+ T cells.

[1206] Conclusion

[1207] The data provided in this Example show that antibodies directed against TCR Vb can, e.g., preferentially activate a subset of T cells, leading to an expansion of TEMRA, which can, e.g., promote tumor cell lysis but not CRS. Thus, bispecific constructs utilizing either a Fab or scFV or a peptide directed to the TCR Vb can, e.g., be used to activate and redirect T cells to promote tumor cell lysis for cancer immunotherapy, without, e.g., the harmful side-effects of CRS associated with anti-CD3e targeting.

### Example 4: On-Target T Cell Mediated Cytotoxicity of Multiple Myeloma (MM) Cells with a Dual-Targeting Antibody Molecule Against BCMA and a T Cell Engager

[1208] This example shows on-target T cell mediated cytotoxicity of multiple myeloma (MM) cells with dual-targeting antibody molecules that recognize a T cell engager, e.g., TCRVb, on T cells and BCMA on MM cells.

[1209] As shown in FIG. 13A, purified human T cells activated with plate-bound anti-TCRVb antibody for 5 days proliferate at a higher rate than purified human T cells activated with plate-bound anti-CD3 (OKT3) antibody. Anti-TCRVb antibody stimulation of T cells resulted in selective expansion of CD45RA+ effector memory CD8+ and CD4+ T cells (TEMRA) cells (FIG. 13B). Both CD8+ and CD4+ Temra cell populations expanded more when stimulated with an anti-TCRVb antibody, compared to unstimulated cells or cells stimulated with an anti-CD3 (SP34) antibody. Anti-TCRVb antibodies resulted in delayed secretion of IFN-g by PBMCs stimulated with an anti-TCRVb antibody compared to PBMCs stimulated with anti-CD3 antibodies (FIG. 13C). Additionally, T cells stimulated with anti-TCRVb antibody or anti-CD3 antibodies resulted in comparable lysis of multiple myeloma target cells, as shown in FIG. 13D. As shown in FIGS. 13E-13F, T cells stimulated for 5 days with 100 ng/ml plate-bound an anti-TCRVb antibody, or an anti-CD3 antibody secreted perforin and Granzyme B.

[1210] Activation of PBMCs with anti-TCRVb antibody resulted in higher production and/or secretion of IL-2 and/or IL-15 compared to PBMCs activated with an anti-OKT3 antibody (FIG. 14A). Anti-TCRVb antibody activated of PBMCs also resulted in expansion and/or survival, e.g., proliferation of Natural Killer (NK) cells (FIG. 14B). In comparison, PBMCS activated with an anti-OKT3 antibody did not result in NK cell expansion. Further, as described in Example 3, PBMCs activated with an anti-TCRVb antibody did not result in the production of cytokines IL-6, IL-10 and TNF-alpha which are associated with CRS (FIG. 15). These in vitro characterization studies show that in some embodiments, anti-TCRVb antibodies, e.g., activate and/or stimulate, T cells to promote T cell killing as evidenced by target cell lysis, perforin secretion and granzyme B secretion, and secretion of IFN-g with, e.g., delayed kinetics.

[1211] Next, the ability of a dual-targeting antibody molecule (Molecule I), which targets BCMA on one arm and TCRVb on the other arm, to target and kill multiple myeloma (MM) cells was tested. Healthy donor PBMCs were co-incubated with the RMPI8226 MM cell line and one of the following dual-targeting antibody molecules: BCMA-TCRVb (Molecule I), BCMA-CD3, or Control-TCRVb; or an isotype control Target cell lysis was then assessed using flow cytometry. As shown in FIG. 16A, the dual-targeting BCMA-TCRVb antibody molecule (Molecule I) resulted in killing of MM cells in vitro.

[1212] The dual-targeting BCMA-TCRVb antibody molecule (Molecule I) was further tested in vivo for its ability to inhibit MM tumor growth in a MM mouse model. The NCI-H929 cell line was injected in NOD-scid IL2rγnull (NSG)recipient mice on Day 0 followed by delivery of PBMCs on Day 9. On Days 12, 15, 18 and 21, the dual-targeting BCMA-TCRVb antibody molecule (Molecule I) was administered via intraperitoneal injection at a dose of 0.5 mg/kg. FIG. 16B shows prevention, e.g., inhibition, of MM tumor growth in vivo with the dual-targeting BCMA-TCRVb antibody molecule (Molecule I). These results demonstrate that in some embodiments the dual-targeting BCMA-TCRVb antibody molecule, e.g., can kill tumor cells, e.g., MM tumor cells, in vitro and in vivo. Accordingly, in some embodiments, a dual-targeting BCMA-TCRVb antibody molecule can be used, e.g., as a therapy for cancer, e.g., a hematological cancer, e.g., MM.

### Example 5: In Vitro Cytotoxicity of a Dual-Targeting Antibody Molecule Against FcRH5 and a T Cell Engager

[1213] This example shows in vitro cytotoxicity on multiple myeloma (MM) cells with a dual-targeting antibody molecule that recognizes a T cell engager, e.g., TCRVb, on T cells and FcRH5 on MM cells. Healthy donor PBMCs or purified T cells were co-incubated with the MOL8M MM cell line and a dual-targeting antibody molecule which targets FcRH5 on one arm and TCRVb on the other arm (Molecule E), or with an isotype control antibody. Target cell lysis was then assessed using flow cytometry. As shown in FIG. 17, the dual targeting FcRH5-TCRVb molecule (Molecule E) resulted in killing of MM cells by both purified T cells or PBMCs. This shows that the dual targeting FcRH5-TCRVb molecule can target and promote killing of MM cells by immune cells, e.g., in PBMCs, including T cells.

### Example 6: Characteristics of Anti-TCR Vβ8a Antibodies

[1214] This Example shows in vitro characterization of anti-TCR Vβ8a antibodies (B-H.1). TCR V138 is also referred to as TCR V1312 (as described in Table 8). Isolated human PBMCs were activated with immobilized (plate-coated) anti-CD3Σ or anti-TCR Vβ8a at 100 nM, and cell culture supernatants were collected on day 1, 2, 3, 5, 6 and 8 post stimulation. Cytokines (IFNγ, IL-2, TNFα, IL-1β or IL-6) were measured using MSD technology platform (MesoScale Discovery) as described in the manufacturer's protocol.

[1215] As shown in FIGS. 18A-18B, Human PBMCs activated by anti-TCR Vβ8a antibodies (B-H.1) produce similar or reduced levels of IFNγ (FIG. 18A) and higher levels IL-2 (FIG. 18B) when compared to those activated by anti-CD3Σ antibodies (OKT3 or SP34-2).

[1216] FIGS. 19A-19B show that human PBMCs activated by anti-TCR Vβ8a antibodies (B-H.1) do not produce significant levels of IL-6, or IL1b. Activation of human PBMCs with anti-TCR Vβ8a antibodies (B-H.1) also results in lesser TNFα when compared to PBMCs activated by anti-CDRϵ antibodies (OKT3 or SP34-2) (see FIG. 19C).

[1217] In summary, as shown in Example 3, this Example shows that anti-TCR Vβ8a antibodies can, e.g., preferentially induce expression of T cell cytokines, e.g., IL-2 and IFNg, but not production of cytokines IL-6, IL-1β and TNF-alpha which are associated with “cytokine storms” (and accordingly CRS).

### Example 7: Characteristics of Anti-TCRβV Antibody D Antibody

[1218] This Example describes characterization of anti-TCRβV antibodies which can bind and activate a subset of T cells, but with, e.g., no or markedly reduced, CRS.

[1219] Human PBMCs were isolated from whole blood followed by solid-phase (plate-coated) stimulation with anti-TCR Vβ12 antibody (Antibody D) or anti-CD3e antibodies (OKT3) at 100 nM. Supernatant was collected on Days 1, 2, 3, 5, or 6 followed by multiplex cytokine analysis for IFNg, IL-2, IL-6, IL-1beta, or TNFalpha. The data was quantified using MSD (Meso Scale Discovery) platform, following the manufacturer's protocol.

[1220] As shown in FIG. 20A, when plate-bound anti-TCR Vβ12 antibody (Antibody D) or anti-CD3e antibodies (OKT3) were used to activate human PBMCs, the T cell cytokine IFNg was induced. With respect to IL-2 production, PBMCs activated with anti-TCR Vβ12 antibody (Antibody D) resulted in increased IL-2 production with delayed kinetics (FIG. 20B) as compared to PBMCs activated with anti-CD3e antibodies (OKT3).

[1221] The production of cytokines IL-6, IL-1β and TNF-alpha which are associated with “cytokine storms” (and accordingly CRS) was also assessed under similar conditions. FIGS. 20C-20E show that that while PBMCs activated with anti-CD3e antibodies demonstrate production of IL-6 (FIG. 20D), TNF-alpha (FIG. 20C) and IL-1β (FIG. 20E), no or little induction of these cytokines was observed with PBMCs activated with anti-TCR Vβ12 antibody (Antibody D).

[1222] The data provided in this Example show that antibodies directed against TCR Vβ can, e.g., preferentially activate a subset of T cells, and do not results in induction of cytokines associated with cytokine storms or CRS.

### Example 8: Characteristics of Anti-TCRβV Antibody E

[1223] This Example describes characterization of anti-TCRβV antibodies which can bind and activate a subset of T cells, but with, e.g., no or markedly reduced, CRS.

[1224] Human PBMCs were isolated from whole blood followed by solid-phase (plate-coated) stimulation with anti-TCR Vβ5 antibody (Antibody E) or anti-CD3e antibodies (OKT3 and SP34-2), each at 100 nM. Supernatant was collected on Days 1, 3, 5, or 7 followed by multiplex cytokine analysis for IFNg, IL-2, IL-6, IL-1beta, IL-10 or TNFalpha. The data was quantified using MSD (Meso Scale Discovery) platform, following the manufacturer's protocol.

[1225] As shown in FIG. 21A, when plate-bound anti-TCR Vβ5 antibody (Antibody E) or anti-CD3e antibodies (OKT3 and SP34-2) were used to activate human PBMCs, the T cell cytokine IFNg was induced. With respect to IL-2 production, PBMCs activated with anti-TCR Vβ5 antibody (Antibody E) resulted in increased IL-2 production with delayed kinetics (FIG. 21B) as compared to PBMCs activated with anti-CD3e antibodies (OKT3 or SP34-2).

[1226] The production of cytokines IL-6, IL-1β, IL-10 and TNF-alpha which are associated with “cytokine storms” (and accordingly CRS) was also assessed under similar conditions. FIGS. 22A-22D show that that while PBMCs activated with anti-CD3e antibodies demonstrate production of IL-1β (FIG. 22A), IL-6 (FIG. 22B), TNF-alpha (FIG. 22C) and IL-10 (FIG. 22D), no or little induction of these cytokines was observed with PBMCs activated with anti-TCR Vβ5 antibody (Antibody E).

[1227] The data provided in this Example show that antibodies directed against TCR Vβ can, e.g., preferentially activate a subset of T cells, and do not results in induction of cytokines associated with cytokine storms or CRS.

### Example 9: Characteristics of a Dual-Targeting Antibody Molecule Against BCMA and TCRβV

[1228] This Example describes characterization of a dual targeting antibody (e.g., a bispecific molecule) comprising an anti-TCRβV binding moiety and a BCMA binding moiety (Molecule H) which can bind and activate a subset of T cells, but with, e.g., no or markedly reduced, CRS.

[1229] Human PBMCs were isolated from whole blood followed by solid-phase (plate-coated) stimulation with an anti-TCRβV×BCMA bispecific molecule (Molecule H) or anti-CD3e antibodies (OKT3), each at 100 nM. Supernatant was collected on Days 1, 2, 3, or 5 followed by multiplex cytokine analysis for IFNg, IL-2, IL-6, IL-1beta, IL-10 or TNFalpha. The data was quantified using MSD (Meso Scale Discovery) platform, following the manufacturer's protocol.

[1230] As shown in FIG. 23A, when plate-bound anti-TCRβV×BCMA bispecific molecule (Molecule H) or anti-CD3e antibodies (OKT3) were used to activate human PBMCs, the T cell cytokine IFNg was induced. With respect to IL-2 production, PBMCs activated with anti-TCRβV×BCMA bispecific molecule (Molecule H) resulted in increased IL-2 production (FIG. 23B) as compared to PBMCs activated with anti-CD3e antibodies (OKT3).

[1231] The production of cytokines IL-6, IL-1β, IL-10 and TNF-alpha which are associated with “cytokine storms” (and accordingly CRS) was also assessed under similar conditions. FIGS. 23C-E show that that while PBMCs activated with anti-CD3e antibodies demonstrate production of IL-1β (FIG. 23C), IL-6 (FIG. 23D), TNF-alpha (FIG. 23D) and IL-10 (FIG. 23E), no or little induction of these cytokines was observed with PBMCs activated with anti-TCRβV×BCMA bispecific molecule (Molecule H).

[1232] The data provided in this Example show that antibodies directed against TCR VP can, e.g., preferentially activate a subset of T cells, and do not result in induction of cytokines associated with cytokine storm or CRS.

### Example 10: Cytokine and Chemokine Profile of Anti-TCRVb Antibodies

[1233] This Examples describes cytokines and chemokines secreted by PBMCs following activation by anti-TCR VP antibodies.

[1234] Human PBMCs were isolated from whole blood followed by solid-phase (plate-coated) stimulation with an anti-TCRβV antibodies (A-H.1, B-H.1), or a bispecific molecule comprising an anti-TCRVb antibody (Molecule H), an isotype control (BGM0122) or an anti-CD3e antibody (SP34), each at 100 nM. Supernatant was collected on Days 1, 2, 3, 4, 5, 6, 7 and 8 followed by multiplex analysis for the indicated cytokines or chemokines. The data was quantified using MSD (Meso Scale Discovery) platform, following the manufacturer's protocol. BGM0122 comprises the amino acid sequence of

(SEQ ID NO: 3283)
METDTLLLWVLLLWVPGSTGDKTHTCPPCPAPELL
GGPSVFLFPPKPKDTLMISRTPEVTCVVVDVSHED
PEVKFNWYVDGVEVHNAKTKPREEQYNSTYRVVSV
LTVLHQDWLNGKEYKCKVSNKALPAPIEKTISKAK
GQPREPQVYTLPPSREEMTKNQVSLTCLVKGFYPS
DIAVEWESNGQPENNYKTTPPVLDSDGSFFLYSKL
TVDKSRWQQGNVFSCSVMHEALHNHYTQKSLSLSP
GKGGGGSGGGGSGLNDIFEAQKIEWHE.

[1235] FIGS. 25A-25J, FIGS. 26A-2611, and FIGS. 27A-27L show the levels of cytokine and chemokine from PBMCs activated with the indicated antibodies.

[1236] As shown in FIG. 25A, when plate-bound anti-TCR VP antibodies or anti-CD3e antibodies (OKT3) were used to activate human PBMCs, the T cell cytokine IFNg was induced. With respect to IL-2 production, PBMCs activated with anti-TCR VP antibodies resulted in increased IL-2 production with delayed kinetics (FIG. 25B) as compared to PBMCs activated with anti-CD3e antibody (OKT3).

[1237] While IL-1beta (FIG. 25C), IL-6 (FIG. 25D), IL-10 (FIG. 25E), IL-4 (FIG. 25F), TNFalpha (FIG. 25G), IP-10 (FIG. 26C), IL-12-23p40 (FIG. 27D), IL-17A (FIG. 27G), and IL-1a (FIG. 2711), were induced by anti-CD3e antibody (OKT3), no or little induction of these cytokines or chemokines was observed with PBMCs activated with anti-TCRVb antibodies.

[1238] PBMCs activated with anti-TCR VP antibodies demonstrated induction of IL-13 (FIG. 251), IL-8 (FIG. 25J), Eotaxin (FIG. 26A), Eotaxin 3 (FIG. 26B), IL-18 (HA) (FIG. 26C), MCP-1 (FIG. 26E), MCP-4 (FIG. 26F), MDC (FIG. 26G), MIP1a (FIG. 2611), MIP1B (FIG. 27A), TARC (FIG. 27B), GM-CSF (FIG. 27C), IL-15 (FIG. 27E), IL-16 (FIG. 27F), and IL-15 (FIG. 271), IL-7 (FIG. 27J).

### Example 11: Nanostring-Based Gene Expression Profiling of TCR Vb-Activated T Cells

[1239] This Example describes gene expression profiling of TCR Vβ-activated T cells to, e.g., uncover potential mechanisms or pathways underlying TCR VP activation of T cells.

[1240] In a first study, the anti-TCR Vβ13.1 antibody A-H.1 was compared with an anti-CD3 antibody OKT3. Briefly, human PBMCs were isolated from whole blood. From isolated PBMCs, human CD3+ T cells were isolated using magnetic-bead separation (negative selection) (Miltenyi biotec) and activated by immobilized (plate-coated) anti-TCR Vβ13.1 antibody (A-H.1) or anti-CD3 antibody (OKT3) at 100 nM for 6 days. Activated T-cells (from plate-coated) were then prepared for gene expression profiling (PanCancer IO 360™ Panel, nanoString), following manufacturer's protocol. Differential gene expression analysis was grouped by anti-TCR Vβ13.1 (A-H.1) vs anti-CD3 (OKT3) activated T-cells using the nSolver Analysis Software (Nanostring). Data shown in Table 15A are mean values from 3 donors. The differentially regulated genes shown in Table 15A have a p-value of 0.05 or less. In the fourth column of Table 15A showing fold changes in gene expression, a positive value indicates genes that are upregulated at the transcriptional level in TCR VP-activated T cells compared to OKT3-activated T cells, whereas a negative value indicates genes downregulated at the transcriptional level in TCR VP-activated T cells compared to OKT3-activated T cells.

TABLE 15A
Summary of genes whose expression are preferentially regulated
in TCR Vβ-activatedT cells compared to OKT3-activated T cells.

| | | | TCR | |
|---|---|---|---|---|
| | | | Vβ13.1 | |
| | | | vs OKT3 | |
| | | | Fold | |
| Probe Name | Accession # | NS Probe ID | Change | P value |
| CCR2 | NM_001123041.2 | NM_001123041.2:743 | −3.06 | 0.00019145 |
| LIF | NM_002309.3 | NM_002309.3:1240 | 21.6 | 0.0003319 |
| TCF7 | NM_003202.2 | NM_003202.2:2420 | −8.38 | 0.00037035 |
| PLA2G6 | NM_001004426.1 | NM_001004426.1:1954 | −2.19 | 0.00043564 |
| CD84 | NM_001184879.1 | NM_001184879.1:28 | −3.81 | 0.00062413 |
| ITGB2 | NM_000211.2 | NM_000211.2:520 | −2.11 | 0.0012003 |
| GZMK | NM_002104.2 | NM_002104.2:700 | −11.09 | 0.00135083 |
| HLA-DRB4 | NM_021983.4 | NM_021983.4:194 | −5.75 | 0.00137591 |
| CCR7 | NM_001838.2 | NM_001838.2:1610 | −2.43 | 0.00165716 |
| PDCD1 | NM_005018.1 | NM_005018.1:175 | 7.24 | 0.00195468 |
| CD96 | NM_005816.4 | NM_005816.4:1355 | −6.44 | 0.00221401 |
| SELL | NR_029467.1 | NR_029467.1:1585 | −5 | 0.00227156 |
| NFATC4 | NM_001136022.2 | NM_001136022.2:2296 | −2.75 | 0.0025171 |
| CD8B | NM_004931.3 | NM_004931.3:440 | −3.56 | 0.00302475 |
| NLRC5 | NM_032206.4 | NM_032206.4:860 | −2.27 | 0.00309164 |
| CD1C | NM_001765.2 | NM_001765.2:750 | 8.62 | 0.0035729 |
| HLA-B | NM_005514.6 | NM_005514.6:937 | −1.81 | 0.00363669 |
| NUP107 | NM_020401.2 | NM_020401.2:1002 | 1.64 | 0.00366886 |
| CD3D | NM_000732.4 | NM_000732.4:110 | −2.05 | 0.00401569 |
| HDAC3 | NM_003883.2 | NM_003883.2:1455 | −1.41 | 0.0042794 |
| PRKCE | NM_005400.2 | NM_005400.2:1695 | −1.86 | 0.00429076 |
| HLA-DQB1 | NM_002123.3 | NM_002123.3:384 | −5.71 | 0.00430297 |
| AKT3 | NM_181690.1 | NM_181690.1:755 | −2.98 | 0.00430433 |
| VCAM1 | NM_001078.3 | NM_001078.3:2535 | −23.93 | 0.00464703 |
| CD53 | NM_001040033.1 | NM_001040033.1:835 | −1.7 | 0.00507702 |
| LRP1 | NM_002332.2 | NM_002332.2:4240 | −2.22 | 0.00508974 |
| CD28 | NM_001243078.1 | NM_001243078.1:2065 | −1.73 | 0.00545641 |
| OSM | NM_020530.4 | NM_020530.4:580 | 8.97 | 0.00558554 |
| CLEC4A | NM_194448.2 | NM_194448.2:388 | −1.7 | 0.0056661 |
| MFGE8 | NM_001114614.1 | NM_001114614.1:328 | −2.75 | 0.00633707 |
| IFNAR2 | NM_000874.3 | NM_000874.3:631 | −3.69 | 0.00659279 |
| LTA | NM_000595.2 | NM_000595.2:885 | 6.53 | 0.00727884 |
| ITGAE | NM_002208.4 | NM_002208.4:3405 | −3.42 | 0.00779862 |
| CXCR5 | NM_001716.3 | NM_001716.3:2618 | 4.38 | 0.00781195 |
| CD6 | NM_006725.3 | NM_006725.3:1280 | −1.38 | 0.00848703 |
| ICOS | NM_012092.2 | NM_012092.2:640 | 1.74 | 0.00914866 |
| NOS2A | NM_153292.1 | NM_153292.1:546 | −2.29 | 0.0095337 |
| CD1A | NM_001763.2 | NM_001763.2:1815 | 5.12 | 0.00956367 |
| CD27 | NM_001242.4 | NM_001242.4:330 | −3.41 | 0.00984676 |
| KLRD1 | NM_002262.3 | NM_002262.3:542 | −6.43 | 0.00998325 |
| TARP | NM_001003799.1 | NM_001003799.1:560 | −3.71 | 0.00998698 |
| HLA-DPB1 | NM_002121.4 | NM_002121.4:931 | −8.85 | 0.01064161 |
| PTPRC | NM_080921.3 | NM_080921.3:258 | −2.86 | 0.01124117 |
| CD44 | NM_001001392.1 | NM_001001392.1:429 | −2.07 | 0.01138242 |
| SLAMF6 | NM_001184714.1 | NM_001184714.1:1032 | −1.81 | 0.00175123 |
| HLA-DMB | NM_002118.3 | NM_002118.3:20 | −6.39 | 0.01184625 |
| CD276 | NM_001024736.1 | NM_001024736.1:2120 | 6.22 | 0.01207813 |
| MAGEA1 | NM_004988.4 | NM_004988.4:476 | −2.93 | 0.01210408 |
| HLA-DMA | NM_006120.3 | NM_006120.3:380 | −5.75 | 0.1210789 |
| EP300 | NM_001429.2 | NM_001429.2:715 | −1.24 | 0.01228626 |
| ADA | NM_000022.2 | NM_000022.2:1300 | −2.97 | 0.01228787 |
| ICAM1 | NM_000201.2 | NM_000201.2:2253 | 2.52 | 0.01290081 |
| SIGIRR | NM_021805.2 | NM_021805.2:469 | −4.46 | 0.01309473 |
| TNF | NM_000594.2 | NM_000594.2:1010 | 4.6 | 0.01318389 |
| IL1RAP | NM_002182.2 | NM_002182.2:460 | 2.77 | 0.01329693 |
| CSF1 | NM_000757.4 | NM_000757.4:823 | 2.55 | 0.01373637 |
| CD40LG | NM_000074.2 | NM_000074.2:1225 | 11.92 | 0.01376174 |
| CYFIP2 | NM_001037332.2 | NM_001037332.2:4043 | −1.38 | 0.01389707 |
| MUC1 | NM_001018017.1 | NM_001018017.1:725 | 3.12 | 0.01399543 |
| HLA-DRB3 | NM_022555.3 | NM_022555.3:698 | −7.11 | 0.01404049 |
| CD2 | NM_001767.3 | NM_001767.3:687 | −1.53 | 0.01432842 |
| IL2RG | NM_000206.1 | NM_000206.1:595 | −1.82 | 0.01477006 |
| HLA-A | NM_002116.5 | NM_002116.5:1000 | −1.96 | 0.01454336 |
| TXK | NM_003328.1 | NM_003328.1:800 | −2.7 | 0.01590341 |
| ITGA4 | NM_000885.4 | NM_000885.4:975 | −3.59 | 0.01601785 |
| DHX16 | NM_001164239.1 | NM_001164239.1:2490 | 1.41 | 0.0167432 |
| CD3E | NM_000733.2 | NM_000733.2:75 | −1.52 | 0.01736902 |
| MR1 | NM_001531.2 | NM_001531.2:7695 | −2.26 | 0.01744764 |
| SMAD3 | NM_005902.3 | NM_005902.3:4220 | −2.82 | 0.01751245 |
| CCRL2 | NM_003965.4 | NM_003965.4:1110 | −1.87 | 0.01834479 |
| HRAS | NM_005343.2 | NM_005343.2:396 | 1.97 | 0.0187379 |
| IL18R1 | NM_003855.2 | NM_003855.2:2025 | 2.36 | 0.01896204 |
| CMA1 | NM_001836.2 | NM_001836.2:561 | −1.96 | 0.01964938 |
| PSMB7 | NM_002799.2 | NM_002799.2:420 | 1.53 | 0.01980367 |
| BCL10 | NM_003921.2 | NM_003921.2:1250 | −1.38 | 0.01981376 |
| HLA-DRA | NM_019111.3 | NM_019111.3:335 | −7.46 | 0.02026993 |
| CD80 | NM_005191.3 | NM_005191.3:1288 | 4.18 | 0.02055337 |
| PIK3CD | NM_005026.3 | NM_005026.3:2978 | −1.23 | 0.02056576 |
| ETS1 | NM_005238.3 | NM_005238.3:4625 | −1.51 | 0.02083359 |
| CHUK | NM_001278.3 | NM_001278.3:860 | 1.67 | 0.0217326 |
| CCL5 | NM_002985.2 | NM_002985.2:280 | −2.47 | 0.02195802 |
| ITGAL | NM_002209.2 | NM_002209.2:3905 | −3 | 0.02244779 |
| TNFRSF18 | NM_004195.2 | NM_004195.2:445 | −3.76 | 0.02330885 |
| EIF2B4 | NM_172195.3 | NM_172195.3:1390 | 1.28 | 0.02349098 |
| CD79A | NM_001783.3 | NM_001783.3:695 | −4.47 | 0.02361746 |
| ABCF1 | NM_001090.2 | NM_001090.2:850 | 1.31 | 0.02452054 |
| CD37 | NM_001774.2 | NM_001774.2:535 | −2.06 | 0.02476513 |
| STAT5B | NM_012448.3 | NM_012448.3:200 | −1.56 | 0.02495121 |
| CSF2 | NM_000758.2 | NM_000758.2:475 | 11.38 | 0.0256982 |
| STAT3 | NM_139276.2 | NM_139276.2:4535 | −1.47 | 0.02629936 |
| GZMA | NM_006144.2 | NM_006144.2:155 | −2.46 | 0.02646368 |
| C1R | NM_001733.4 | NM_001733.4:760 | −3.1 | 0.02653879 |
| MIF | NM_002415.1 | NM_002415.1:319 | −1.38 | 0.02690018 |
| CD46 | NM_172350.1 | NM_172350.1:365 | −1.36 | 0.02725208 |
| PIK3CG | NM_002649.2 | NM_002649.2:2125 | −2.34 | 0.02762105 |
| CFB | NM_001710.5 | NM_001710.5:2029 | −2.59 | 0.02802998 |
| IL3 | NM_000588.3 | NM_000588.3:130 | 13.37 | 0.02820076 |
| TNFRSF13C | NM_052945.3 | NM_052945.3:789 | −2.2 | 0.02835259 |
| MRPS5 | NM_031902.3 | NM_031902.3:390 | 1.2 | 0.02849936 |
| TUBB | NM_178014.2 | NM_178014.2:320 | 1.06 | 0.02874459 |
| PECAM1 | NM_000442.3 | NM_000442.3:1365 | −4.35 | 0.02901845 |
| PVR | NM_006505.3 | NM_006505.3:604 | 2.28 | 0.0299334 |
| AMICA1 | NM_153206.2 | NM_153206.2:620 | −2.38 | 0.03034954 |
| CD74 | NM_001025159.1 | NM_001025159.1:964 | −3.28 | 0.0305419 |
| ENTPD1 | NM_001098175.1 | NM_001098175.1:8830 | −8.02 | 0.03085618 |
| CD97 | NM_078481.2 | NM_078481.2:1370 | −1.56 | 0.03086014 |
| KLRK1 | NM_007360.3 | NM_007360.3:522 | −4.16 | 0.03108504 |
| HLA-DQA1 | NM_002122.3 | NM_002122.3:261 | −5.51 | 0.03126291 |
| CD247 | NM_198053.1 | NM_198053.1:1490 | −1.88 | 0.03182703 |
| IFNG | NM_000619.2 | NM_000619.2:970 | 5.98 | 0.03202586 |
| SAA1 | NM_199161.1 | NM_199161.1:135 | −2.35 | 0.03341258 |
| TBX21 | NM_013351.1 | NM_013351.1:890 | 1.92 | 0.03359165 |
| RORA | NM_134261.2 | NM_134261.2:1715 | −2.57 | 0.03591525 |
| MASP2 | NM_139208.1 | NM_139208.1:330 | −1.65 | 0.03611762 |
| CLU | NM_001831.2 | NM_001831.2:2340 | −1.55 | 0.0369776 |
| KLRB1 | NM_002258.2 | NM_002258.2:85 | −7.43 | 0.03705134 |
| RELA | NM_021975.2 | NM_021975.2:360 | −1.26 | 0.03765981 |
| SLAMF1 | NM_003037.2 | NM_003037.2:580 | 1.82 | 0.03768168 |
| CD8A | NM_001768.5 | NM_001768.5:1320 | −4.49 | 0.0380276 |
| IL11RA | NM_147162.1 | NM_147162.1:400 | −3.54 | 0.03855863 |
| CD3G | NM_000073.2 | NM_000073.2:404 | −1.44 | 0.03877635 |
| JAK1 | NM_002227.1 | NM_002227.1:285 | −1.84 | 0.4001383 |
| SPN | NM_003123.3 | NM_003123.3:2345 | −1.72 | 0.04035383 |
| CXCR4 | NM_003467.2 | NM_003467.2:1335 | −3.03 | 0.04122601 |
| FAS | NM_000043.3 | NM_000043.3:90 | −2.37 | 0.04150638 |
| IL2 | NM_000586.2 | NM_000586.2:300 | 10.9 | 0.04175377 |
| ITGA1 | NM_181501.1 | NM_181501.1:1875 | −2.75 | 0.04213304 |
| IGF1R | NM_000875.2 | NM_000875.2:455 | −1.94 | 0.0424234 |
| CLEC6A | NM_001007033.1 | NM_001007033.1:342 | −2.83 | 0.04299769 |
| RPS6 | NM_001010.2 | NM_001010.2:171 | −1.36 | 0.04334091 |
| MAPK11 | NM_002751.5 | NM_002751.5:1310 | −1.98 | 0.04344288 |
| REL | NM_002908.2 | NM_002908.2:225 | −2.37 | 0.04382344 |
| EOMES | NM_005442.2 | NM_005442.2:1670 | −6.49 | 0.04442535 |
| KLRG1 | NM_005810.3 | NM_005810.3:65 | −3.52 | 0.04487411 |
| IL2RA | NM_000417.1 | NM_000417.1:1000 | 3.4 | 0.0457568 |
| IFNA17 | NM_021268.2 | NM_021268.2:291 | −3.13 | 0.04595868 |
| SH2D1B | NM_053282.4 | NM_053282.4:545 | −1.44 | 0.04640447 |
| CCL2 | NM_002982.3 | NM_002982.3:123 | 4.01 | 0.04660539 |
| TXNIP | NM_006472.1 | NM_006472.1:255 | −4.07 | 0.04695375 |
| CXCL13 | NM_006419.2 | NM_006419.2:210 | −65.05 | 0.04708191 |
| CASP8 | NM_001228.4 | NM_001228.4:301 | −1.42 | 0.04720592 |
| MTMR14 | NM_022485.3 | NM_022485.3:720 | −1.25 | 0.04798024 |
| MAP3K5 | NM_005923.3 | NM_005923.3:1760 | −1.62 | 0.04838454 |
| ADORA2A | NM_000675.3 | NM_000675.3:1095 | 1.3 | 0.04872028 |
| CCR5 | NM_000579.1 | NM_000579.1:2730 | −4.01 | 0.04885927 |

[1241] In a second study, the multispecific anti-TCR Vβ3.1/anti-BCMA antibody Molecule H was compared with the anti-CD3 antibody OKT3. Purified T cells were stimulated with solid-phase anti-TCR VP antibody over 6 days with the anti-TCR VP antibody Molecule H or anti-CD3e antibody (OKT3) at 100 nM. Expanded T cells were collected by centrifugation followed by RNA extraction. Seven hundred and seventy eight (778) immunology-related genes were counted using the nCounter Technology (Nanostring) followed by gene expression analysis using nSolver analysis tools. The data described in this Example is representative of 3 donors.

[1242] Based on this analysis, a panel of genes were identified as being differentially regulated in TCR VP-activated T cells compared to OKT3-activated T cells (Table 15B). The differentially regulated genes shown in Table 15B have a p-value of 0.05 or less. For example, LIF, CD40LG, PDCD1, CXCR5, LTA, and CD80 are all upregulated at the transcriptional level in TCR Vβ-activated T cells compared to OKT3-activated T cells. GZMK, ENTPD1 (CD39), TCF7, CD96, HLA-DRB4, SIGIRR and SELL are downregulated at the transcriptional level in TCR Vβ-activated T cells compared to OKT3-activated T cells. TCR Vβ-activated T cells also expressed high levels of cytolytic effectors (e.g., IFNg, Granzyme B and perforin).

TABLE 15B
Summary of genes whose expression are preferentially regulated in TCR Vβ-activated
T cells compared to OKT3-activated T cells.

| | | Log₂ | |
|---|---|---|---|
| | | Fold | |
| Gene | Description | Change | P-Value |
| LIF | LIF Interleukin 6 Family Cytokine | 4.65 | 0.0119 |
| GZMK | Granzyme K | −3.65 | 0.0468 |
| CD40LG | CD40 Ligand | 3.56 | 0.0082 |
| ENTPD1 (CD39) | Ectonucleoside Triphosphate Diphosphohydrolase 1 | −3.53 | 0.0541 |
| PDCD1 | Programmed Cell Death 1 | 3.19 | 0.0257 |
| TCF7 | Transcription Factor 7 | −3.1 | 0.00634 |
| CXCR5 | Chemokine receptor for CXCL13 | 3.05 | 0.0337 |
| CD96 | Transmembrane glycoprotein Ig superfamily receptor, | −2.75 | 0.007 |
| | interacts with nectin and nectin-like proteins, | | |
| | including CD155/polio virus receptor (PVR) | | |
| LTA | Lymphotoxin Alpha | 2.67 | 0.0082 |
| HLA-DRB4 | Major Histocompatibility Complex, Class 11, DR Beta 4 | −2.66 | 0.0377 |
| CD80 | T cell costimulatory molecule | 2.58 | 0.0425 |
| SIGIRR | Single Ig And TIR Domain Containing | −2.37 | 0.0227 |
| SELL | Selection L | −2.3 | 0.00634 |

### Example 12: Binding Affinity of Affinity Matured Humanized Antibody A-H Antibodies

[1243] This Example describes the evaluation of binding affinity of affinity matured humanized Antibody A-H antibodies to recombinant protein TCRVB 6-5.

[1244] Antibody A-H humanized antibodies were affinity matured. The resulting affinity matured antibodies were tested for their binding affinity to TCRVB 6-5 as described below.

[1245] TCRVB 6-5 at 5 ug/mL was immobilized on a Biotin CAP Series S Sensor Chip to 60 RU. BJM0277 was diluted to 200 nM and then serially diluted two fold. Association was 120 seconds, and dissociation was 300 seconds. This assay was run in 1×HBS-EP+ Buffer pH 7.4 and 25C. The data was fit using a 1:1 binding model.

[1246] TCRVB 6-5 at 5 ug/mL was immobilized on a Biotin CAP Series S Sensor Chip to 60 RU. A-H.45 was diluted to 50 nM and then serially diluted two fold. Association was 120 seconds, and dissociation was 300 seconds. This assay was run in 1×HBS-EP+ Buffer pH 7.4 and 25C. The data was fit using a 1:1 binding model. A-H.45 is an improved yeast clone (TCRvB/CD19 bispecific) and contains a mutation (G to V) at the last residue in framework 3, just before HCDR3. The affinity is 35-fold greater than the BJM0277 (Table 16).

[1247] TCRVB 6-5 at 5 ug/mL was immobilized on a Biotin CAP Series S Sensor Chip to 60 RU. A-H.52 was diluted to 50 nM and then serially diluted two fold. Association was 120 seconds, dissociation was 300 seconds. This assay was run in 1×HBS-EP+ Buffer pH 7.4 and 25C. The data was fit using a 1:1 binding model. A-H.52 is a phage clones and is a monovalent scFv. A-H.52 has two mutations on CDRH1. The affinity of A-H.52 is 20-fold greater than BJM0277 (Table 16).

[1248] TCRVB 6-5 at 5 ug/mL was immobilized on a Biotin CAP Series S Sensor Chip to 60 RU. A-H.53 was diluted to 50 nM and then serially diluted two fold. Association was 120 seconds, dissociation was 300 seconds. This assay was run in 1×HBS-EP+ Buffer pH 7.4 and 25C. The data was fit using a 1:1 binding model. A-H.53 (phage clone) affinity is in the pM range (Table 16). The affinity of A-H.53 is 200-fold greater than BJM0277 (Table 16).

[1249] TCRVB 6-5 at 5 ug/mL was immobilized on a Biotin CAP Series S Sensor Chip to 60 RU. A-H.54 was diluted to 50 nM and then serially diluted two fold. Association was 120 seconds, dissociation was 300 seconds. This assay was run in 1×HBS-EP+ Buffer pH 7.4 and 25C. The data was fit using a 1:1 binding model. A-H.54 (phage clone) affinity is 17-fold greater than BJM0277 (Table 16).

TABLE 16
Summary of affinity maturation
of anti-TCRVb antibodies

| | Target: |
|---|---|
| Construct | TCRVβ 6-5 |
| BJM0277 | 35 nM |
| A-H.45 | 1.08 Nm |
| A-H.52 | 1.76 nM |
| A-H.53 | 165 pM |
| A-H.54 | 2.22 nM |

### Example 13: Therapeutic Efficacy of CD19/TCRvB Bispecific Molecules in Subcutaneous Human Tumor Xenograft Models

[1250] This Example demonstrates the in vivo efficacy of a CD19/TCRvB Bispecific molecule in a subcutaneous human tumor animal model.

[1251] On day 1 of the study 1×10⁶ cells of the human cancer cell line Raji, stably expressing firefly luciferase (Raji-luc) were subcutaneously injected in the right dorsal flank of female NOD/SCID/IL-2Rγnull (NSG) mice. On day 3, 10×10⁶ human PBMCs were transplanted into mice by injection into the peritoneal cavity.

[1252] Antibody treatment started at day 10, when tumors had reached a mean tumor volume (TV) of 80 mm³. Mean TV of each group was not statistically different from any other group at start of treatment. Mice were treated with 0.2 mg/kg, 1 mg/kg and 5 mg/kg of CD19/TCRvB bispecific molecule every three days for a total of 7 doses by intravenous bolus injection.

[1253] Tumor volume (TV) was measured every 3 days by calipers and progress evaluated by intergroup comparison of TV. Tumor growth inhibition T/C [%] was calculated as T/C[%]=100×(mean TV of analyzed group)/(mean TV of vehicle group).

[1254] Results are shown in Table 17 and FIG. 28. Treatment with the CD19/TCRvB Bispecific molecule inhibited tumor growth compared to vehicle control treatment (FIG. 28). The results demonstrate that the CD19/TCRvB bispecific molecule inhibits tumor growth and has anti-tumor activity.

TABLE 17
Mean tumor volume and tumor growth inhibition (T/C) at days 10 to 28.

| Dose group | Data | D10 | D13 | D16 | D19 | D23 | D25 | D28 |
|---|---|---|---|---|---|---|---|---|
| Vehicle | TV (mm³) | 84 | 241 | 566 | 802 | 1577 | 2161 | 2478 |
| | T/C[%] | 100 | 100 | 100 | 100 | 100 | 100 | 100 |
| 0.2 mg/kg CD19/TCRvB | TV (mm³) | 82 | 169 | 460 | 643 | 967 | 946 | 875 |
| | T/C[%] | 98 | 70 | 81 | 80 | 61 | 44 | 35 |
| 1 mg/kg CD19/TCRvB | TV (mm³) | 82 | 122 | 147 | 307 | 482 | 469 | 406 |
| | T/C[%] | 98 | 51 | 26 | 38 | 31 | 22 | 16 |
| 5 mg/kg CD19/TCRvB | TV (mm³) | 79 | 160 | 200 | 381 | 510 | 409 | 382 |
| | | 94 | 66 | 35 | 48 | 32 | 19 | 15 |

### Example 14: Therapeutic Efficacy of CD19/TCRvB Bispecific Molecules in Human Tumor Xenograft Models

[1255] This Example demonstrates the in vivo efficacy of a CD19/TCRvB Bispecific molecules in a xenograft animal model.

[1256] On day 1 of the study 10×10⁶ human PBMCs were transplanted into NOD/SCID/IL-2Rγnull (NSG) mice by injection into the peritoneal cavity.

[1257] On day 7, 1×10⁶ cells of the human cancer cell line Raji, stably expressing firefly luciferase (Raji-luc) were intravenously injected into NOD/SCID/IL-2Rγnull (NSG) mice. Control animals were injected with 10×10⁶ cells of the CD19 negative human cancer cell line K562 stably expressing firefly luciferase (K562-luc). These animals were used to assess specific killing ability of CD19/TCRvB molecules. Antibody treatment started at day 16, when tumor engraftment had reached a mean bioluminescence flux level of 4×10⁷ photons/s. Mean Flux level of each group was not statistically different from any other group at start of treatment. Mice were treated with 1 mg/kg and 5 mg/kg of CD19/TCRvB bispecific molecule every three days for a total of 6 doses by intravenous bolus injection.

[1258] Tumor burden was measured weekly by bioluminescence imaging and progress evaluated by intergroup comparison of total bioluminescence flux (Total Flux). Tumor growth inhibition T/C [%] was calculated as T/C[%]=100×(mean Total Flux of analyzed group)/(mean Total Flux of vehicle group).

[1259] The results for Raji-luc engrafted animals are shown in Table 18 and FIG. 29A and results for K562-luc engrafted animals are shown in Table 19 and FIG. 29B. The results demonstrate that the CD19/TCRvB bispecific molecule inhibits tumor growth and has anti-tumor activity (FIG. 29A and Table 18).

TABLE 18
Mean tumor burden (Total Flux) and tumor growth inhibition (T/C) at days
16 to 37 in animals engrafted with Raji-luc cells

| Dose group | Data | D16 | D23 | D30 | D37 |
|---|---|---|---|---|---|
| Vehicle | Total Flux (p/s) | 4.26E+07 | 5.92E+07 | 5.77E+08 | 4.23E+09 |
| | T/C [%] | 100 | 100 | 100 | 100 |
| 1 mg/kg CD19/TCRvB | Total Flux (p/s) | 4.05E+07 | 2.66E+07 | 5.03E+07 | 5.42E+08 |
| | T/C [%] | 95.0 | 44.9 | 8.7 | 12.8 |
| 5 mg/kg CD19/TCRvB | Total Flux (p/s) | 4.18E+07 | 3.10E+07 | 2.37E+07 | 1.44E+08 |
| | T/C [%] | 98.0 | 52.3 | 4.1 | 3.4 |

TABLE 19
Mean tumor burden (Total Flux) and tumor growth inhibition (T/C)
at days 16 to 30 in animals engrafted with K562-luc cells

| Dose group | Data | D16 | D23 | D30 |
|---|---|---|---|---|
| Vehicle | Total Flux (p/s) | 2.98E+07 | 9.94E+08 | 2.40E+10 |
| | T/C [%] | 100 | 100 | 100 |
| 5 mg/kg | Total Flux (p/s) | 2.00E+07 | 1.22E+09 | 3.82E+10 |
| CD19/TCRvB | | | | |
| | T/C [%] | 67.0 | 122.4 | 159.4 |

### Example 15: Therapeutic Efficacy of BCMA/TCRvB Bispecific Molecules in Human Tumor Xenograft Models

[1260] This Example demonstrates the in vivo efficacy of a BCMA/TCRvB Bispecific molecule in a xenograft animal model.

[1261] On day 1, 20×10⁶ cells of the human cancer cell line RPMI-8226, stably expressing firefly luciferase (RPMI-8226-luc) were intravenously injected into NOD/SCID/IL-2Rγnull (NSG) mice. On day 11, 10×10⁶ human PBMCs were transplanted into mice by injection into the peritoneal cavity. Antibody treatment started at day 17, when tumor engraftment had reached a mean bioluminescence flux level of 4×10⁷ photons/s. Mice were treated with 0.5 mg/kg of a molecule bivalent for both BCMA and TCRvB (2×2 molecule) and 0.5 mg/kg of a molecule bivalent for BCMA and monovalent for TCRvB (2×1 molecule) once a week for a total of 2 doses by intravenous bolus injection.

[1262] Tumor burden was measured weekly by bioluminescence imaging and progress evaluated by intergroup comparison of total bioluminescence flux (Total Flux). Tumor growth inhibition T/C [%] was calculated as T/C[%]=100×(mean Total Flux of analyzed group)/(mean Total Flux of vehicle group).

[1263] Results of these studies are shown in Table 20 and FIG. 30. Treatment with the BCMA/TCRvB Bispecific molecule inhibited tumor growth compared to vehicle control treatment (FIG. 29). The results demonstrate that the BCMA/TCRvB bispecific molecule inhibits tumor growth and has anti-tumor activity.

TABLE 20
Mean tumor burden (Total Flux) and tumor growth
inhibition (T/C) at days 16 to 30.

| Dose group | Data | D16 | D23 | D30 |
|---|---|---|---|---|
| Vehicle | Total Flux (p/s) | 3.71E+06 | 6.04E+06 | 7.29E+06 |
| | T/C [%] | 100 | 100 | 100 |
| 0.5 mg/kg | Total Flux (p/s) | 7.33E+06 | 6.30E+06 | 1.13E+06 |
| BCMA/TCRvB | | | | |
| 2 × 2 | | | | |
| | T/C [%] | 197.7 | 104.3 | 15.5 |
| 0.5 mg/kg | Total Flux (p/s) | 3.66E+06 | 3.15E+06 | 5.65E+05 |
| BCMA/TCRvB | | | | |
| 2 × 1 | | | | |
| | T/C [%] | 98.8 | 52.1 | 7.8 |

### Example 16: Expression and Purification of Antibody Constructs

[1264] Construction of the Plasmids

[1265] The DNA encoding the protein sequences was optimized for expression in Cricetulus griseus, synthesized, and cloned into the pcDNA3.4-TOPO (Life Technologies A14697) using Gateway cloning. All constructs contained an Ig Kappa leader sequence METDTLLLWVLLLWVPGSTG (SEQ ID NO: 3288).

[1266] Expression and Purification

[1267] The plasmids were co-transfected into either Expi293 cells (Life Technologies A14527) or ExpiCHO cells (Life Technologies A29127). Transfections were performed using 1 mg of total DNA for a multispecific construct with a 1:1 heavy chain ratio and 3:2 light chain to heavy chain ratio if applicable. Transfection in Expi293 cells was done using linear 25,000 Da polyethylenimine (PEI, Polysciences Inc 23966) in a 3:1 ratio with the total DNA. The DNA and PEI were each added to 50 mL of OptiMem (Life Technologies 31985088) medium and sterile filtered. The DNA and PEI were combined for 10 minutes and added to the Expi293 cells with a cell density of 1.8-2.8×10⁶ cells/mL and a viability of at least 95%. The ExpiCHO transfection was performed according to the manufacturer's instructions. Expi293 cells were grown in a humidified incubator at 37° C. with 8% CO₂ for 5-7 days after transfection and ExpiCHO cells were grown for 14 days at 32° C. with 5% CO₂. The cells were pelleted by centrifugation at 4500×g and the supernatant was filtered through a 0.2 μm membrane. Protein A resin (GE 17-1279-03) was added to the filtered supernatant and incubated for 1-3 hours at room temperature. The resin was packed into a column, washed with 3×10 column volumes of Dulbecco's phosphate-buffered saline (DPBS, Life Technologies 14190-144). The bound protein was eluted from the column with 20 mM citrate, 100 mM NaCl, pH 2.9. When necessary, the proteins were further purified using ligand affinity and/or size exclusion chromatography on a Superdex 200 column with a running buffer of DPBS.

### Example 17: Humanization of Anti-TRBV5-5 Antibody Clone Antibody C

[1268] The germline for the mouse anti-TCRvbeta antibody clone Antibody C VH and VL were assigned using IMGT nomenclature, with CDR regions defined by a combined Kabat and Chothia classification. SEQ ID NO: 232 and SEQ ID NO: 233 are the Antibody C VH and VL sequences respectively where the VH germline is mouse IGHV2-6-7*01 and the VL germline is mouse IGKV10-94*02. The method applied to humanize Antibody A described in Example 1 was used to humanize Antibody C. The Antibody C VH was humanized into human IGHV2-26*01, IGHV2-70*04, IGHV4-4*02, IGHV2-5*09, IGHV2-5*08, IGHV4-34*09, IGHV4-59*01, IGHV4-59*07, IGHV4-61*02, IGHV4-38-2*01, IGHV4-31*01, IGHV3-49*04, IGHV3-49*02, IGHV4-4*07, IGHV3-49*05, IGHV4-34*10, IGHV4-28*04, IGHV3-72*01, IGHV3-15*07, IGHV6-1*01, IGHV3-7*01, IGHV4-34*01, IGHV3-33*02, IGHV3-48*02, IGHV3-23*03, IGHV3-21*01, IGHV3-73*01, IGHV3-30*02, IGHV3-7*01, IGHV3-43*01, and IGHV3-53*03 and the Antibody C VL was humanized into human IGKV1D-43*01, IGKV1-27*01, IGKV1-17*02, IGKV1-17*01, IGKV1-5*01, IGKV4-1*01, IGKV3-7*02, IGKV3-7*01, IGKV2-29*02, IGKV6D-41*01, IGKV2-28*01, IGKV2-40*01, IGKV3-15*01, IGKV2-24*01, IGKV6-21*01, IGKV2D-26*01, and IGKV2D-26*03.

[1269] SEQ ID NOs: 3040-3089 are the Antibody C humanized heavy chains and SEQ ID NOs: 3000-3039 are the Antibody C humanized light chains (as described in Table 10).

### Example 18: Humanization of TRBV10-1, TRBV10-2, and TRBV10-3 Antibody Clone Antibody D

[1270] The germline for the mouse anti-TCRvbeta antibody clone Antibody D VH and VL were assigned using IMGT nomenclature, with CDR regions defined by a combined Kabat and Chothia classification. SEQ ID NO: 3183 and SEQ ID NO: 3184 are the Antibody D VH and VL sequences respectively where the VH germline is mouse IGHV5-6*01 and the VL germline is mouse IGKV4-59*01.

[1271] The method applied to humanize Antibody A described in Example 1 was used to humanize Antibody D. The Antibody D VH was humanized into human IGHV3-30*03, IGHV3-30*02, IGHV3-7*01, IGHV3-21*01, IGHV3-23*04, IGHV3-30*15, IGHV3-48*02, IGHV3-53*04, IGHV3-23*03, IGHV3-53*03, IGHV3-53*01, IGHV3-9*01, IGHV3-30*13, IGHV3-20*01, IGHV3-43D*03, IGHV3-43*02, IGHV3-43*01, IGHV3-53*02, IGHV3-13*01, IGHV3-38-3*01, IGHV3-9*03, IGHV3-64D*06, IGHV3-33*02, IGHV3-11*03, IGHV3-64*02, IGHV3-64*01, IGHV3-64*03, IGHV3-7*01, IGHV3-35*01, IGHV3-13*02, IGHV3-38*02, and IGHV3-38*01 and the Antibody D VL was humanized into human IGKV3-11*01, IGKV1-13*02, IGKV1-9*01, IGKV6-21*01, IGKV1D-43*01, IGKV3-11*01, IGKV3D-11*02, IGKV1-17*03, IGKV3D-20*01, IGKV3-20*01, IGKV1D-16*01, IGKV4-1*01, IGKV2-28*01, IGKV2-40*01, IGKV2-29*02, IGKV2-29*01, IGKV1D-42*01, IGKV2-24*01, and IGKV5-2*01. SEQ ID NOs: 3225-3274 are the Antibody D humanized heavy chains and SEQ ID NOs: 3185-3224 are the Antibody D humanized light chains (as described in Table 12).

### Example 19: Humanization of TRBV5-5 and TRBV5-6 Antibody Clone Antibody E

[1272] The germline for the mouse anti-TCRβ antibody clone Antibody E VH and VL were assigned using IMGT nomenclature, with CDR regions defined by a combined Kabat and Chothia classification. SEQ ID NO: 3091 and SEQ ID NO: 3092 are the Antibody E VH and VL sequences respectively where the VH germline is mouse IGHV1-82*01 and the VL germline is mouse IGKV3-5*01.

[1273] The method applied to humanize Antibody A described in Example 1 was used to humanize Antibody E. The Antibody E VH was humanized into human IGHV1-69*08, IGHV1-3*02, IGHV1-18*03, IGHV1-3*01, IGHV1-18*01, IGHV1-2*06, IGHV1-2*01, IGHV1-2*06, IGHV1-8*01, IGHV7-4-1*02, IGHV1-58*02, IGHV5-51*01, IGHV7-4-1*04, IGHV7-81*01, IGHV5-51*04, IGHV5-51*01, IGHV1-45*03, IGHV3-49*04, IGHV3-49*02, IGHV3-49*05, IGHV4-4*02, IGHV3-49*05, IGHV3-73*01, IGHV4-4*02, IGHV3-15*07, IGHV3-15*02, IGHV3-72*01, IGHV4-59*07, IGHV4-31*01, IGHV4-31*02, IGHV3-30*15, IGHV3-21*01, IGHV3-7*01, IGHV4-28*01, IGHV4-28*02, IGHV3-30*08, IGHV3-30*05, and IGHV3-30*01 and the Antibody E VL was humanized into human IGKV4-1*01, IGKV3-11*01, IGKV3-20*02, IGKV3-11*01, IGKV1-13*02, IGKV3D-11*01, IGKV3D-20*02, IGKV1-13*02, IGKV3D-20*01, IGKV1-9*01, IGKV3D-15*03, IGKV3-15*01, IGKV1-5*01, IGKV2D-29*01, IGKV3-7*02, IGKV1-9*01, IGKV2-28*01, IGKV2-40*01, IGKV2D-29*02, IGKV3-7*01, IGKV2-30*01, IGKV2-24*01, IGKV6D-41*01, IGKV1D-42*01, IGKV2D-26*01, IGKV2D-26*03, and IGKV5-2*01. SEQ ID NOs: 3133-3182 are the Antibody E humanized heavy chains and SEQ ID NOs: 3093-3132 are the Antibody E humanized light chains (as described in Table 11).

### Example 20: In Vitro Cytotoxicity of an Anti-TCRVb/CD19 Antibody Molecule and an Anti-TCRVb/BCMA Antibody Molecule

[1274] Anti-TCR/Anti-CD19 Dual Targeting Antibody Molecule

[1275] Human PBMCs were isolated from whole blood. From isolated PBMCs, human CD3+ T cells were isolated using magnetic-bead separation (negative selection) (Miltenyi biotec) and activated by immobilized (plate-coated) anti-TCR Vβ13.1 (A-H.1) at 100 nM for 6 days. Activated T-cells (from plate-coated) were then transferred and expanded in tissue culture flask in the presence of human IL-2 at a concentration of 50 U/ml for two additional days. Expanded TCR Vβ13.1+ cells were washed and co-cultured in the presence of CD19-expressing Raji cells (target cells) at an E:T ratio of 5:1 and serial diluted concentrations of T-cell engager bispecific antibodies including, anti-TCR Vβ13.1/CD19 (Molecule F), anti-CD3/CD19, and anti-TCR V1313.1 (A-H.1, serving as control) for 24 hours. Post 24 hours, cell co-culture supernatants were collected and quantified for specific target cell death. Target cells (Raji cells) are a KILR-retroparticles reporter cell assay (DiscoverX). KILR-Raji target cells are engineered to stably express a protein tagged with enhanced ProLabel (ePL), a β-gal reporter fragment, using the KILR Retroparticles, and when the membrane of the target cells is compromised due to cell death, the target cells will release the tagged protein into the media. This KILR reporter protein can be detected in the media/supernatant by the addition of detection reagents containing the enzyme acceptor (EA) fragment of the β-gal reporter. This leads to the formation of the active β-gal enzyme which hydrolyzes the substrate to give a chemiluminescent output (RLU). Percentage (%) of target cell death is calculated using the following formula:

(RLU_{Treatment}−RLU_{No Treatment})/(RLU_{Maximum Lysis}−RLU_{No Treatment})×100

[1276] Data shown in FIG. 31A are mean values from 4 donors.

[1277] Anti-TCR/Anti-BCMA Dual Targeting Antibody Molecule

[1278] Human PBMCs were isolated from whole blood. From isolated PBMCs, human CD3+ T cells were isolated using magnetic-bead separation (negative selection) (Miltenyi biotec) and activated by immobilized (plate-coated) anti-TCR Vβ13.1 (A-H.1) at 100 nM for 6 days. Activated T-cells (from plate-coated) were then transferred and expanded in tissue culture flask in the presence of human IL-2 at a concentration of 50 U/ml for two additional days. Expanded TCR Vβ13.1+ cells were washed and co-cultured in the presence of BCMA-expressing RPMI8226 cells (target cells) at an E:T ratio of 5:1 and serial diluted concentrations of T-cell engager bispecific antibodies including, anti-TCR Vβ13.1/BCMA (Molecule G), anti-CD3/BCMA, and anti-TCR Vβ13.1 (A-H.1, serving as control) for 24 hours. Post 24 hours, cell co-culture supernatants were collected and quantified for specific target cell death. Target cells (RPMI8226 cells) are a KILR-retroparticles reporter cell assay (DiscoverX). KILR-RPMI8226 target cells are engineered to stably express a protein tagged with enhanced ProLabel (ePL), a (3-gal reporter fragment, using the KILR Retroparticles, and when the membrane of the target cells is compromised due to cell death, the target cells will release the tagged protein into the media. This KILR reporter protein was detected and percentage (%) of target cell death was calculated as described above. Data shown in FIG. 31B are mean values from 4 donors.

### Example 21: Cytokine Profile of an Anti-TCRVb/BCMA Antibody Molecule

[1279] This Example describes cytokines secreted by PBMCs following activation by the anti-TCR Vβ/anti-BCMA antibody Molecule H. For comparison, activation by an anti-TCR beta constant 1 (TRBC1) antibody Antibody F was also analyzed.

[1280] Briefly, human PBMCs were isolated from whole blood followed by solid-phase (plate-coated) stimulation with Molecule H or Antibody F at 100 nM. Supernatant was collected on Days 1, 2, 3, and 5 (for Molecule H) or Days 2 and 5 (for Antibody F) followed by multiplex cytokine analysis for IFNγ, IL-2, IL-1β, IL-6, IL-10, and TNFα, quantified using MSD (Meso Scale Discovery) platform, following the manufacturer's protocol.

[1281] As shown in FIGS. 32A-32F and 33A-33F, the cytokine profile of the anti-TCR Vβ/anti-BCMA antibody Molecule H is different from that of the anti-CD3 antibody OKT3 or the anti-TRBC1 Antibody F.

### Example 22: Kinetics of T Cell Expansion Following TCRβV 6-5 Stimulation

[1282] To assess the kinetics and absolute count of anti-TCRβv 6-5 expanded T cells—either PBMCs or purified T cells were stimulated with plate-immobilized anti-TCRvb 6-5 antibody over 8 days with a T cell-activating antibody at 100 nM. T cell activating antibodies tested included: i) anti-TCRvb 6-5 v1 antibody; ii) anti-TCRvb 6-5 v2; iii) OKT3 (anti-CD3ε antibody); iv) SP34-2 (anti-CD3ε antibody); and v) IgG1 N297A (isotype control). Cell pellets were collected each day and stained for CD3, CD4, CD8 and TCRvb 6-5 for flow analysis.

[1283] TCRvb 6-5+ T cell expansion over 8 days using anti-TCRvb 6-5 v1 is shown in FIG. 34, as assessed by flow cytometry. The data is for a single representative donor; and similar results were seen with PBMCs from two other independent donors. FIG. 36 further shows the specific expansion of TCRvb 6-5+CD4+ T cells and TCRvb 6-5+CD8+ T cells by TCRvb 6-5 v1. In contrast, there was no specific TCRvb 6-5+ T-cell expansion by OKT3 (FIG. 35; FIG. 37).

[1284] FIGS. 38A and 38B show selective expansion of TCRβV 6-5+ T cells in human PBMCs (FIG. 38A) and purified T cells (FIG. 38B).

[1285] FIGS. 39A-41 shows that anti-TCRβV and anti-CD3ε antibodies expand T cells in a PBMC culture (FIGS. 39A and 39B) or a purified T cell culture (FIGS. 40A and 40B)) to comparable levels after 8 days, as measured by both relative count of TCRVB 6-5+ T cells (FIGS. 39A-40B) and relative count of total CD3+ T cells (FIGS. 39A-41).

### Example 23: Activated TCRvb 6-5+ T Cells Exert Cytolytic Function

[1286] To assess the ability of T cells activated/expanded with anti-TCRVβ to mediate tumor cell lysis—purified T cells were stimulated over 6 days with an immobilized T cell-activating antibody at 100 nM. T cell activating antibodies tested included: i) TCRvb 6-5 v1 antibody; ii) OKT3 (anti-CD3ε antibody); or iii) IgG1 N297A (isotype control). Target cells (RPMI-8226 cells) were added on each day and incubated with the activated T cells at an initial effector T cell:target (E:T) cell ratio of 5:1 for 48 hours. Quantification of target cell lysis was measured using CFSE/CD138 and DRAQ7 FACS staining. Three different T cell donors were used (donor 6769, donor 9880, donor 54111). The data shows that the kinetics of target cell lysis by TCRVb 6-5 v1 activated T cells correlates with the expansion of TCRvb 6-5+ T cells (FIG. 42).

[1287] To further assess target cell lysis OKT3 or TCRvb 6-5 v1 antibodies were immobilized (plate-coated) with a ½ log serial dilution from a top dose concentration of 100 nM for purified T-cell (pan CD3 isolated) activation. The purified T-cells were stimulated with the activation plate for 0 (i.e. without antibody preactivation) to 4 (i.e. with antibody preactivation) days prior to addition of the target cells. Target cells (RPMI8226) were added to the activation plate (at an initial E:T cell ratio, 5:1) for up to 6-days (i.e. for plate 0, E:T coculture for 6-days, and for plate 4, E:T coculture for 2-days) followed by target cell lysis quantification via CFSE/CD138 and DRAQ7 FACS staining. The data shows that without T-cell preactivation, approximately 3% of Vb cells were able to kill target cells at day 6 (at higher concentration) (FIG. 43A); and with T-cell preactivation, approximately 25% of Vb cells were able to kill target cells at day 6 (the killing curve is shifted to the left) (FIG. 43B). TCRvb 6-5 v1 activated T cells exhibit comparable maximal target cell lysis when compared to anti-CD3ε when T cells are preactivated for 4 days (FIG. 44). At 100 nM, TCRvb 6-5 v1 activation shows comparable killing of target cells to anti-CD3ε activation (FIG. 45) (preactivation between 4-6 days depending on the donor and the cultures cultured for 48 h in presence of target cells).

### Example 24: Assessing TCRvb Downregulation/Internalization by Anti-TCRvb 6-5 Antibody

[1288] To assess the effect anti-TCRvb 6-5 mediated T cell activation has on cell surface expression of TCRvb—purified T cells were stimulated over 8 days with the indicated T cell-activating antibody at 100 nM (plate bound). T cell activating antibodies included: i) anti-TCRvb 6-5 v1 antibody; or ii) SP34-2 (anti-CD3ε antibody). Cell pellets were collected each day and stained for CD3, CD4, CD8 and TCRβV 6-5 for flow cytometry analysis. A total of three donors were tested, each showing similar results.

[1289] The results show that both anti-CD3ε and anti-TCRvb antibodies activated CD4+ T cells (FIG. 46) and activated CD8+ T cells (FIG. 47) display reduced CD3ε cell surface expression; whereas, TCRvb 6-5 cell surface expression on CD4+ T cells (FIG. 48) and CD8+ T cells (FIG. 49) remains detectable post T cell activation. The results show that the CD3ε subunit is downregulated/internalized in T cells activated by either anti-CD3ε or anti-TCRvb antibodies; while TCRvb 6-5 remains detectable post T cell activation. Additionally, CD4 and CD8 staining did not show any signs of downmodulation of these receptors by either antibody.

### Example 25: Cynomolgus Cross Reactivity of Anti-TCRβV Antibodies

[1290] To assess the cross reactivity of anti-TCRβV antibodies for cynomolgus TCRβV clonotype—fresh and cryopreserved cynomolgus PBMCs were cultured in complete media (RPMI with 10% FBS) in tissue culture treated flat bottom 96 well plates precoated with anti-TCRβV 6-5 v1 or anti-CD3 antibodies at 100 nM concentration. Negative control or unstimulated wells received PBS alone. TCRβV 6-5 expression was evaluated after 6 days in culture using CytoFlex flow cytometer (Beckmann Coulter) and imaged. Two donors samples were used: Donor DW8N—fresh PBMC sample, male, age 8, weight 7.9 kgs (data presented in FIG. 50A); Donor G709-cryopreserved sample, male, age 6, weight 4.7 kgs (data presented in FIG. 50B). The data show that cynomolgus T cells were activated and expanded by the anti-TCRβV 6-5 v1 (FIG. 50A and FIG. 50B). Fresh cynomolgus PBMCs from donor DW8N that had shown TCRvb 6-5 expansion were cryopreserved and after a week in cryopreservation, the cells were thawed and stimulated using anti-CD3 and anti-TCRvb 6-5 v1 for seven days. Cluster formation and expansion were both reproducible as shown in FIG. 51.

### Example 26: No Activation of δ T Cells by Anti-TCRβV Antibodies

[1291] To determine if anti-TCRvb antibodies are able to activate [symbol] δ T cells— [symbol] δ T cells were purified from human PBMCs via magnetic bead separation. [symbol] δ T cells were immobilized on plate-coated anti-CD3ε (SP34-2) or anti-TCRvb 6-5 (anti-TCRvb 6-5 v1) antibodies for 24 hours and analyzed for CD69 and CD25 expression by flow cytometry. Supernatants were collected post activation 2, 5, and 7 days, and analyzed for cytokines using Meso Scale Discovery (MSD) assay. FACS gating/staining on PBMCs was conducted prior to [symbol] δ T cell purification showing that [symbol] δ T cells are vβ6-5 negative (Donor 12657—gating for [symbol] δ T and TCRvβ6-5 based on FMO) (FIG. 52). FACS gating/staining on purified [symbol] δ T cell was conducted showing that purified [symbol] δ T cells are vβ-5 negative (Donor 12657—gating for [symbol] δ T and TCRvβ6-5 based on FMO) (FIG. 53). As shown in FIG. 54, the anti-TCR Vβ6-5 antibody (anti-TCRvb 6-5 v1) did not activate [symbol] δ T cells; while the anti-CD3ε antibody (SP34-2) did. The cytokine analysis showed that anti-TCRβV 6-5 v1 does not induce cytokine release by [symbol] δ T cells, cytokines analyzed include IFNγ, TNFα, IL-2, IL-17A, IL-1a, IL-1β, IL-6, and IL-10 (FIG. 55A-55H).

### Example 27: Polyclonal T Cell Expansion by Anti-TCRVβ Antibodies

[1292] To assess the ability of anti-TCRVβ antibodies to induce polyclonal T cell expansion—human CD3+ T cells were isolated using magnetic-bead separation (negative selection) and activated with immobilized (plate-coated) anti-TCRβV 6-5 v1 at 100 nM for 6 days. The expanded T cell population was washed and lysed using Takara single cell lysis buffer for SMART(er) TCR cDNA synthesis and sequencing. TCR sequencing was carried out and absolute counts and relative representation of the different TCR alpha V and J segments and TCR beta V, D, and J segments were determined, as well as the different variants of each of them that arise from Artemis/TdT activity during the V(D)J recombination, and that correspond to unique clones of T cells. FIG. 56 shows the relative representations of all TCR alpha V segments (TRAV group of genes) and their variants (top), all TCR beta V segment 6-5 variants (TRBV6-5 gene) (bottom left), and all TCR beta V segments and variants excluding 6-5 (bottom right). The data show that the anti-TCRVβ antibody stimulation does not induce proliferation of specific T cell clones within the TRBV6-5 positive population, as the relative difference in clonal representation in that population is comparable to the TRBV6-5 negative population as well as total TRAV usage.

### Example 28: T Cells Expanded by Anti-TCRβV Represent a Novel Subset of Recently Activated Effector T Cells

[1293] To assess the phenotype of anti-TCRβV expanded T cells—purified T cells were stimulated with solid-phase anti-TCRβV antibody over 8 days with the indicated T cell-activating antibody at 100 nM: i) anti-TCRvb 6-5 v1 antibody; ii) anti-TCRvb 6-5 v2; iii) OKT3 (anti-CDR antibody); or iv) IgG1 N297A (isotype control). T-cell subsets were identified by FACS staining for specific surface markers for: Naive T cell (CD4/CD8+, CD45RA+, CCR7+); T stem cell memory (TSCM; CD4/CD8+, CD95+, CD45RA+, CCR7+); T central memory (TCM; CD4/CD8+, CD95+, CD45RA−, CCR7+); T effector memory (TEM; CD4/CD8+, CD95+, CD45RA−, CCR7−); T effector memory re-expressing CD45RA (TEMRA; CD4/CD8+, CD95+, CD45RA+, CCR7−); and CD27, CD28, 4-1BB, OX40, and ICOS. Data is representative of more than 5 independent experiments.

[1294] The data shows that CD4+ T cells expanded by anti-TCR Vβ antibody (FIG. 57A), but not OKT3 (FIG. 57B), share phenotypic markers with the TEMRA subset. Likewise, the data shows that CD4+ T cells expanded by anti-TCR Vβ antibody (FIG. 58A), but not OKT3 (FIG. 58B), share phenotypic markers with the TEMRA subset. Further analysis of PD1 expression showed anti-TCR Vβ activated CD4+ T cells (FIG. 59A) and CD8+ T cells (FIG. 59B) display increased PD1 expression relative to anti-CDR activated CD4+ T cells (FIG. 59A) and CD8+ T cells (FIG. 59B). These anti-TCR Vβ activated CD4+ T cells (FIG. 60A) (PD-1+ TEMRA phenotype) and anti-TCR Vβ activated CD8+ T cells (FIG. 60B) (PD-1+ TEMRA phenotype) show Ki-67 enriched phenotype relative to anti-CDR activated CD4+ T cells (FIG. 60A) and CD8+ T cells (FIG. 60B).

[1295] Further analysis of CD57 expression showed anti-TCR Vβ activated CD8+ T cells (FIG. 61A) do not display increased CD57 expression relative to anti-CDR activated CD8+ T cells (FIG. 61B). Likewise, analysis of CD27 and CD28 expression showed anti-TCR Vβ activated CD4+ T cells (FIG. 62 top) and anti-TCR Vβ activated CD8+ T cells (FIG. 62 bottom) do not display increased CD27 and CD28 expression relative to anti-CDR activated CD8+ T cells (FIG. 62).

[1296] Further analysis of OX40, 41BB, and ICOS expression showed anti-TCR Vβ activated CD4+ T cells (FIG. 63 top) and anti-TCR Vβ activated CD8+ T cells (FIG. 63 bottom) display increased OX40, 41BB, and ICOS expression relative to anti-CD3ε activated CD8+ T cells (FIG. 63).

[1297] The TEMRA like phenotype of anti-TCR VP antibody expanded T cells was further analyzed using time lapse flow cytometry to evaluate expression of CD45RA and CCR7 at different time points post activation. Isolated human T-cells were activated with immobilized (plate-coated) anti-CD3ε or anti-TCR Vβ at 100 nM for between 1-8-days. After each (1, 2, 3, 4, 5, 6, 8-) day activation, T-cell subsets were identified by FACS staining for surface markers for Naïve/TSCM T cell (CD4+/CD8+, CD45RA+, CCR7+), T central memory (TCM; CD4+/CD8+, CD95+, CD45RA−, CCR7+), T effector memory (TEM; CD4+/CD8+, CD95+, CD45RA−, CCR7−), and T effector memory re-expressing CD45RA (TEMRA; CD4+/CD8+, CD95+, CD45RA+, CCR7−). TCRβV+ T-cells are identified by TCR Vβ+ staining. FACS stained samples were analyzed by flow cytometry analysis. Data shown a representative for CD4+ T-cells from 1 of 3 donors.

[1298] FIG. 64 shows a series of FACS plots showing the percentage of CD3+(CD4 gated) TCRβV 6-5+ T cells 1, 2, 3, 4, 5, 6, and 8 days port activation with BCMA and the anti-TCR Vβ antibody anti-TCR Vβ 6-5 v1. Analysis of the percentage of CD4+ T cells expanded using isotype control (IgG1 N297A), anti-TCRβV (anti-TCR VP 6-5 v1), or anti-CD3ε (OKT3) antibodies on day 0 post activation (FIG. 65A), day 1 post activation (FIG. 65B), day 2 post activation (FIG. 65C), day 3 post activation (FIG. 65D), day 4 post activation (FIG. 65E), day 5 post activation (FIG. 65F), day 6 post activation (FIG. 65G), and day 8 post activation (FIG. 65H). The percentage of TEMRA like T cells expressing both CD45RA and CCR7 shows an increase in the population of TEMRA like cells in the CD4+ TCR 6-5+ T cell cultures expanded with the anti-TCR Vβ 6-5 v1 antibody compared to those expanded with the OKT3 antibody. Similar results were seen with CD8+ T cells. The results further show that purified human T-cells activated by anti-TCRβV 6-5 directly differentiates to TEMRA subsets and proliferate when compared to purified T-cells activated by anti-CD3ε (OKT3).

[1299] In summary, the data shows anti-TCRβV antibodies activated and expanded T cells represent a novel subset of recently activated effector T cells which share phenotypic markers with T_{EMRA}. This is in contrast to anti-CD3e-expanded T cells which differentiated into T_{CM} and T_{EM}. TCRβV expanded T cells are highly proliferative and do not upregulate the senescent marker CD57 OX40, 4-1BB, and ICOS are upregulated on anti-TCRβV activated T cells.

### Example 29: Metabolic State of αTCRβV Activated T Cells

[1300] To evaluate the metabolic phenotype of T cells activated with αTCRβV antibodies—naïve T cells from PBMCs were stimulated and expanded for 5 days with plate-bound anti-CD3 antibody (OKT3) or anti-TCRβV antibody (anti-TCRβV 6-5 v1 antibody). Activated T cells were then rested in IL-2 containing media for 2 days, before they were cryopreserved. Prior to assay setup, cells were thawed and re-stimulated for 3 days with plate-bound anti-CD3 Ab (clone OKT3) or anti-TCRβV antibody (anti-TCRβV 6-5 v1 antibody), respectively. Equal numbers of live cells were plated on a Seahorse cartridge, and the Real-Time ATP Rate Assay was performed according to manufacturer's instructions. The data showed that ATP production from glycolysis (FIG. 66A) oxidative phosphorylation (FIG. 66B) in T cells from 3 donors (representative results from a single donor presented in FIG. 66A-66B) activated with the anti-TCRβV 6-5 v1 antibody increased compared to T cells activated with the OKT3 antibody (3-fold increase in ATP production was observed on average); and one donor showed equal levels of ATP production in anti-TCRβV 6-5 v1 and OKT3 Ab stimulated cells (data not shown).

[1301] The increased mitochondrial respiration in T cells activated with anti-TCRβV 6-5 v1 antibody compared to T cells activated with the OKT3 antibody is further shown in FIG. 67, which shows the oxygen consumption rate (OCR) of T cells from about 0 to 75 minutes activated with the indicated antibody. Data in FIG. 66 is from a single donor; a second donor tested showed equal levels of ATP production in anti-TCRβV 6-5 v1 and OKT3 Ab stimulated cells (data not shown). FIGS. 68A-68C show the oxygen consumption rate (OCR) of T cells activated with the indicated antibody during basal respiration (FIG. 68A), maximal respiration (FIG. 68B), and spare respiratory capacity (FIG. 68C). Cells were plated in media containing glucose and glutamine to measure basal OCR. FCCP (ETC accelerator) was added to the cell culture medium to determine maximum respiratory capacity/max OCR. Antimycin A & Rotenone (ETC inhibitor) were added to the cell culture medium to determine spare respiratory capacity and non-mitochondrial oxygen consumption. The data presented in FIGS. 68A-68C α-TCRβV 6-5 v1 activated T cells had significantly increased basal respiration, maximal respiration, and spare respiratory capacity compared to α-CD3 (OKT3) activated T cells (data from a single donor). A second donor was tested which showed equal levels of ATP production in anti-TCRβV 6-5 v1 and OKT3 Ab stimulated cells (data not shown). FIG. 68D indicates the areas of basal respiration and maximal respiration as shown in FIG. 67A and FIG. 67B, respectively.

[1302] In order to determine if the observed increase in metabolism due to differences in T cell stimulation, or is it intrinsic to the differentiation stage of T cells activated with anti-TCRβV antibodies TCRβV 6-5+ T cells were expanded for 5 days with plate-bound anti-TCRβV 6-5 v1 Ab. Cells were then rested in IL-2 containing media for 2 days and cryopreserved. Upon thawing, cells were re-stimulated with anti-TCRβV 6-5 v1 for 3 days. Cells were then counted and equal numbers of live cells were re-seeded and stimulated with plate-bound anti-CD3 Ab (clone OKT3) or anti-TCRβV 6-5 v1, respectively, for 24 hours. Equal numbers of live cells were plated on the Seahorse cartridge and the Real-Time ATP Rate Assay was performed.

[1303] The results show that ATP production by glycolysis (FIG. 69A) and oxidative phosphorylation (FIG. 69B) by T cells activated with anti-TCRβV 6-5 v1 is significantly increased upon re-stimulation with α-CD3 antibody OKT3 versus α-TCRβV 6-5 v1 antibody. The observed increase in metabolism of T cells activated with anti-TCRβV 6-5 v1 appears to be due to intrinsic differences upon differentiation into these cells. T cells activated with anti-TCRβV 6-5 v1 have an increased metabolism compared to CD3-activated T cells, which can be further enhanced with strong T cell stimulation via OKT3.

[1304] In summary, the results show that T cells activated with anti-TCRβV antibodies have a metabolic memory phenotype. The cells are not metabolically exhausted, because exhausted T cells have a decreased metabolism. α-TCRβV 6-5 v1-stimulation induces a T cell differentiation stage, which is highly metabolically active, indicative of an effector memory phenotype. This metabolic phenotype is maintained when these cells are re-stimulated with other T cell engagers (OKT3).

### Example 30: Assessment of CRS with Anti-CD3e Antibody Compared to Anti-TCRβV Antibody

[1305] To determine CRS effect of a low affinity (Teneobio) anti-CD3e antibody, a cytokine release assay (CRA) with PBMCs was used. Briefly, PBMCs from two donors were stimulated with plate-coated antibodies: anti-TCRvb6-5 v2, anti-CD3e(SP34) or Teneobio's anti-CD3e antibody. T cell activating antibodies were tested at 100 nM, the highest concentration previously shown not to induce CRS cytokines in this assay. Supernatants were collected at day 1, 3, 5 and 7. Cytokine secretion measurement (IFN-g, IL-10, IL-15, IL-17A, IL-1a, IL-1b, IL-2, IL-4, IL-6 and TNF-α) was detected using MSD analysis. The data show results from two donors.

[1306] FIGS. 70A-70F show that a reduced affinity anti CD3e antibody (TeneoBio) induces expression of IFNg, TNFα, IL-1a, IL-1b, IL-6 (CRS and neurotoxicity associated cytokines) similar to the SP34-2 anti CD3e antibody. In contrast, the anti-TCRvb6-5 v2 of the present invention does not induce CRS or neurotoxicity associated cytokines.

[1307] In summary the data shows that Tenebio's anti-CD3e antibody induces cytokines associated with CRS and neurotoxicty in this highly sensitive PBMC CRA. Thus, Tenebio's anti-CD3e antibody has potential to induce CRS and NT as seen with SP34-based T cell-redirecting bispecific molecules. The anti-TCRvb6-5 disclosed herein does not induce CRS- and NT-associated cytokines in this assay, suggesting that in some embodiments, TCRvb6-5 based antibodies may be amenable to administration at higher doses and avoid MABEL (minimum anticipated biologic effect level) dosing regimen required for current CD3e-based bispecific molecules.

### Example 31: Anti-TCRβV Stimulated PBMC Mediated Stimulation of NK Cell Expansion

[1308] To assess whether anti-TCRβV stimulated PBMCs mediate expansion of NK cells in vitro—human PBMCs were stimulated with 100 nM of plate-coated anti-TCRβV 6-5 v1 anti-CD3ε (OKT3 and SP34-2) for up to 7 days. NK cells were identified via FACS staining for CD3-/CD56+/CD16+/NKp46+ populations. NK cell count was determined by a constant μl sample (presented as relative count for each donor). NK cell-mediated target cell lysis was determined 6-days post stimulation, in which PBMCs were harvested and co-cultured with K562 target cells for 4 hours to determine cell killing, via DRAQ7 viability FACS staining.

[1309] The results show that anti-TCRβV stimulation increases NK cell numbers compared to OKT3 stimulation (FIG. 71; FIG. 72). FACS CFSE staining further shows NK cell proliferation (FIG. 73). FIG. 74 and FIG. 75 show NK cell mediated lysis of target K562 cells. In summary, anti-TCRβV 6-5 antibody induces expansion of NK cells in PBMC; and this effect is unlikely to be mediated through the FcR on NK cells as anti-CD3ε antibodies did not expand NK cells. Expanded NK cells by anti-TCRβV 6-5 v1 mediate potent target cell (K562) lysis in vitro.

[1310] In addition to the experiments conducted above using the anti-TCRβV 6-5 v1 antibody, similar experiments were carried out using anti-TCRβV antibodies that recognize different clonotypes. In one experiment, the anti-TCRβV 12 antibodies: anti-TCRvβ12-3/4 v1, anti-TCRvβ12-3/4 v2, and anti-TCRvβ12-3/4 v3 were used to activate/expand PBMCs using solid-phase stimulated (plate-coated) with the indicated T cell-activating antibody at 100 nM for 6 days as described above. Flow analysis was performed for NK cells using NKp46 and CD56 (CD3 negative). Data was generated from 3 donors and representative of 1 independent experiments.

[1311] Activation/expansion of the PBMCs with isotype control or the anti-CD3ε antibody OKT3 or SP34-2 did not induce expansion of NK cells (FIG. 76; FIG. 78). However, activation/expansion of PBMCs with anti-TCRvβ12-3/4 v1 (FIG. 77), anti-TCRvβ12-3/4 v2 (FIG. 77), and anti-TCRvβ12-3/4 v3 (FIG. 78) all induced NK cell expansion. In summary, the data shows that anti-TCRvb 12 antibodies are able to induce indirect expansion of NK cells from PBMC cultures in vitro.

### Example 32: Concentration Response to Anti-TcrβV Stimulation In Vitro

[1312] Human PBMCs were solid-phase stimulated (plate-coated) with the indicated T cell-activating antibody at the indicated different concentrations: i) anti-TCRvb 6-5 v1 antibody; ii) OKT3 (anti-CD3ε antibody); or iii) SP34-2 (anti-CD3ε antibody). Supernatant were collected on day 1, day 3 and day 5 and cytokines quantified by using Meso Scale Discovery (MSD) assay. The production of cytokines IFN [symbol] (FIG. 79), IL-2 (FIG. 80), IL-15 (FIG. 81), IL-1β (FIG. 82), IL-6 (FIG. 83), and IL-10 (FIG. 84) was analyzed. The results indicate that the lack of CRS associated cytokine induction by T cells activated with an anti-TCRvb is not a result of inhibition or toxicity due to high antibody concentrations.

### Example 33: T Cells Activated by Anti-TCRβV Antibodies have a Distinct Cytokine Release Profile Compared to T Cell Activated with Anti-CDR Antibodies

[1313] To assess the cytokine release profile of T cells activated/expanded using anti-TCRβV antibodies as compared to anti-CD3ε antibodies— PBMCs were cultured in cell culture plates coated with the immobilized anti-TCRβV antibody anti-TCRβV 6-5 v1 or an anti-CD3ε antibody, either OKT3 or SP37-2. The cells were cultured for 1-8 days, the supernatant collected, and cytokines analyzed using Meso Scale Discovery (MSD) assay. T cells samples from numerous different human donors were tested.

[1314] FIG. 85 shows a summary of data from 17 donors. The highest overall cytokine secretion from time points (day 3 and beyond) was used for further analysis. Each data point was normalized against the highest secretion for each donor and showed as relative % of highest (at a confidence interval of 0.95 percentile). The data shows that T cells activated/expanded with an anti-TCRβV antibody as compared to anti-CD3ε antibody release less IFN [symbol] , TNFα, IL-1(3, IL-4, IL-6, IL-10, and IL-17; while releasing an increased amount of IL-2 (FIG. 85).

[1315] A series of experiments using the methods previously described, but varying the culture period were conducted with PBMCs from different donors. In one experiment, PBMCs from four different donors were cultured in plates coated with immobilized anti-TCRβV antibody anti-TCRβV 6-5 v1 or an anti-CD3ε antibody, either OKT3 or SP37-2 for 1-6 days. The data confirms that T cells activated/expanded with an anti-TCRβV antibody as compared to anti-CDR antibody release lower levels of IFN [symbol] (FIG. 86A), IL-1β (FIG. 86B), IL-4 (FIG. 86C), IL-6 (FIG. 86D), IL10 (FIG. 86E), and TNFα (FIG. 86F); and higher levels of IL-2 (FIG. 86G).

[1316] In a second experiment, PBMCs from six different donors were cultured in plates coated with immobilized anti-TCRβV antibody, either anti-TCRβV 6-5 v1 or anti-TCRβV 6-5 v1; or an anti-CDR antibody, either OKT3 or SP37-2 for 1-6 days, or isotype control. The data confirms that T cells activated/expanded with an anti-TCRβV antibody as compared to anti-CDR antibody release lower levels of IFNγ (FIG. 87A), IL-10 (FIG. 87B), IL-4 (FIG. 87C), IL-6 (FIG. 87D), IL10 (FIG. 87E), and TNFα (FIG. 87F); and higher levels of IL-2 (FIG. 87G).

[1317] In a third experiments, PBMCs from three different donors were cultured in plates coated with immobilized anti-TCRβV antibody, either anti-TCRβV 6-5 v1 or anti-TCRβV 6-5 v1; or an anti-CDR antibody, either OKT3 or SP37-2 for 1-8 days, or isotype control. The data confirms that T cells activated/expanded with an anti-TCRβV antibody as compared to anti-CD3£ antibody release lower levels of IFNγ (FIG. 88A), IL-10 (FIG. 88B), IL-4 (FIG. 88C), IL-6 (FIG. 88D), IL10 (FIG. 88E), and TNFα (FIG. 88F); and higher levels of IL-2 (FIG. 88G).

[1318] In a fourth experiments, PBMCs from two different donors were cultured in plates coated with immobilized anti-TCRβV antibody, either anti-TCRβV 6-5 v1 or anti-TCRβV 6-5 v1; or an anti-CDR antibody, either OKT3 or SP37-2 for 2-7 days, or isotype control. The data confirms that T cells activated/expanded with an anti-TCRβV antibody as compared to anti-CD3£ antibody release lower levels of IL-17A (FIG. 89A). In a fifth experiments, PBMCs from four different donors were cultured in plates coated with immobilized anti-TCRβV antibody, either anti-TCRβV 6-5 v1 or anti-TCRβV 6-5 v1; or an anti-CD3£ antibody, either OKT3 or SP37-2 for 2-8 days, or isotype control. The data confirms that T cells activated/expanded with an anti-TCRβV antibody as compared to anti-CDR antibody release lower levels of IL-17A (FIG. 89B). In a sixth experiments, PBMCs from two different donors were cultured in plates coated with immobilized anti-TCRβV antibody, either anti-TCRβV 6-5 v1 or anti-TCRβV 6-5 v1; or an anti-CD3£ antibody, either OKT3 or SP37-2 for 2-7 days, or isotype control. The data confirms that T cells activated/expanded with an anti-TCRβV antibody as compared to anti-CD3£ antibody release lower levels of IL-17A (FIG. 89C). In a seventh experiments, PBMCs from two different donors were cultured in plates coated with immobilized anti-TCRβV antibody, either anti-TCRβV 6-5 v1 or anti-TCRβV 6-5 v1; or an anti-CDR antibody, either OKT3 or SP37-2 for 2-7 days, or isotype control. The data confirms that T cells activated/expanded with an anti-TCRβV antibody as compared to anti-CD3ε antibody release lower levels of IL-17A (FIG. 89D).

[1319] A series of similar experiments were conducted using the TCRβV antibody anti-TCRβV 6-5 v1 or anti-TCRvb 12-3/4 v1 to further assess the cytokine release profile of T cells activated/expanded using anti-TCRβV antibodies as compared to anti-CD3ε antibodies. As described above, PBMCs were cultured in cell culture plates coated with the immobilized anti-TCRβV antibody, anti-TCRβV 6-5 v1 or anti-TCRvb 12-3/4 v1; or an anti-CD3ε antibody, either OKT3 or SP37-2; isotype control; or anti-TCRβV 6-5 v1 in combination with. The cells were cultured for 1-8 days, the supernatant collected, and cytokines analyzed using Meso Scale Discovery (MSD) assay. Data generated from 2 donors and representative of 2 independent experiments.

[1320] The data confirmed that T cells activated/expanded by either anti-TCRβV antibody, anti-TCRβV 6-5 v1 or anti-TCRvb 12-3/4 v1, as compared to either anti-CD3ε antibody (OKT3 or SP37-2) secreted a lower level of IFNγ (FIG. 90A), IL-1β (FIG. 90B), IL-4 (FIG. 90C), IL-6 (FIG. 90D), IL10 (FIG. 90E), TNFα (FIG. 90F); and higher levels of IL-2 (FIG. 90G). Secretion of IL-12p70 (FIG. 90H), IL-13 (FIG. 90I), IL-8 (FIG. 90J), Exotaxin (FIG. 90K), Exotaxin-3 (FIG. 90L), IL-8 (FIG. 90M), IP-10 (FIG. 90N), MCP-1 (FIG. 90O), MCP-4 (FIG. 90P), MDC (FIG. 90Q), MIP-1a (FIG. 90R), MIP-1b (FIG. 90S), TARC (FIG. 90T), GMCSF (FIG. 90U), IL-12-23p40 (FIG. 90V), IL-15 (FIG. 90W), IL-16 (FIG. 90X), IL-17a (FIG. 90Y), IL-1a (FIG. 90Z), IL-5 (FIG. 90AA), IL-7 (FIG. 90BB), TNF-β (FIG. 90CC), and VEGF (FIG. 90DD), were also tested.

[1321] In addition to determining the cytokine profile of T cells activated with the αTCRβV antibodies αTCRβV 6-5 v1 and αTCRβV 6-5 v2 (described above); the assays were conducted with additional αTCRβV antibodies recognizing different clonotypes.

[1322] In one series of experiments antibodies tested included anti-TCRvb 12-3/4 v1, anti-TCRvb 10, and anti-TCRvb 5. Per the protocol described above, human PBMCs were solid-phase stimulated (plate-coated) with the indicated T cell-activating antibody (anti-TCRvb 12-3/4 v1, anti-TCRvb 10, anti-TCRvb 5, or the anti-CD3ε antibody SP34) at 100 nM. Supernatant were collected on day 1 to day 8; and cytokines were quantified using Meso Scale Discovery (MSD) assay. 91 provides a graphical representation of sequences between the different clonotypes, highlighting the four subfamilies tested in this series of experiments. PBMCs activated/expanded with the anti-TCRvb 12-3/4 v1 antibody (FIG. 92A), anti-TCRvb 10 antibody (FIG. 92B), or anti-TCRvb antibody (FIG. 92C) exhibited lower levels of secretion of cytokines associated with cytokine release syndrome, including IFNγ, TNFα, IL-10, IL-2, IL-6, and IL-10, as compared to PBMCs activated/expanded with the anti-CD3ε antibody SP34-2.

[1323] In a second series of experiments, antibodies tested included the anti-TCRVβ antibodies: BJ1460, BJ1461, BJ1465, BJ1187, BJM1709; the anti-CD3ε antibody OKT3, and a cell only control. At Day-0 PBMCs from donor 10749 were thawed and counted along with PBMCs from two fresh donors (13836 and 14828). 200,000 PBMCs in 180 uL of X-vivo media/well (1×10e6 cells/mL) was added to a round bottom 96 well plate—one donor for ⅓ of the plate. 20 uL of 10× TCRVβ antibodies at 100 nM or 15 μg/mL were added to the wells of the plate and one triplicate of wells was added with cells only. The pate was kept in a 37° C. incubator with 5% CO₂. The cells were stimulated for 3 days with a selected antibody and 50 μL of supernatant harvested from the plate and stored at −20° C. 50 μL of media was added back to each well and the plate kept in a 37° C. incubator with 5% CO₂. On Day-6 50 uL of supernatant was harvested from each well of the plate and stored at −20° C. The cells from two wells out of the triplicate were combined and media replenished with huIL-2 was added the cell suspension for each donor was transferred into a 12-well plate. The cells were incubated overnight to allow for rest and expansion in IL-2. The cells were subsequently stained for specific VP-clones for detection of specific VP-clone expansion by FACS analysis. The concentration of cytokines (including IFN [symbol] , IL-10, IL-17A, IL-1α, IL-1β, IL-2, IL-6, and TNFα) in the media were analyzed in the Day-3 and Day-6 supernatant samples using Meso Scale Discovery (MSD) assay. The data confirmed that PBMCs cells activated/expanded using any of the anti-TCRβV antibodies—BJ1460, BJ1461, BJ1465, BJ1187, BJM1709—secreted lower levels of IFN [symbol] (FIG. 93A), IL-10 (FIG. 93B), IL-17A (FIG. 93C), IL-1a (FIG. 93D), IL-10 (FIG. 93E), IL-6 (FIG. 93F), TNFα (FIG. 93G); and higher levels of IL-2 (FIG. 9311). FACS analysis further showed expansion of T cells expressing the indicated TCRVβ clones (FIG. 94).

[1324] In a third series of experiments, antibodies tested included the anti-TCRVβ antibodies: BHM1675, BJM0816, BJ1188, BJ1189, BJ1190; and the anti-CD3ε antibody SP34-2. The indicated antibodies were coated into a 96-well round bottom plate at concentration of 100 nM or 15 μg/mL at 200 μl/well in PBS at 4° C. overnight or at 37° C. for a minimum of 2 hours. The plate was washed the next day with 200 μL of PBS and 0.2×10\hat{ }6 PBMCs/well from donors: CTL_123, CTL_323 and CTL_392. Supernatant samples were collected on days 1, 3, 5, and 7. A 10-plex Meso Scale Discovery (MSD) assay was run on the supernatants to determine the concentration of cytokines (including IFNγ, IL-10, IL-17A, IL-1α, IL-1β, IL-6, IL-4, and IL-2). After day 7, cells were pelleted and added to culture medium supplemented with IL-2 for one additional day to allow for expansion. Expansion of T cells expressing TCRVβ clones was analyzed by FACS staining using the same activating antibody followed by a secondary anti-human/mouse FITC antibody. Live/Dead, CD4+ and CD8+ T cells were also stained for using BHM1675, BJM0816, BJ1189 and BJ1190 antibodies. The data confirmed that PBMCs cells activated/expanded using any of the anti-TCRβV antibodies-BHM1675, BJM0816, BJ1188, BJ1189, BJ1190—secreted lower levels of IFN [symbol] (FIG. 95A), IL-10 (FIG. 95B), IL-17A (FIG. 95C), IL-1α (FIG. 95D), IL-1β (FIG. 95E), IL-6 (FIG. 95F), IL-4 (FIG. 95G); and higher levels of IL-2 (FIG. 95H). FACS analysis further showed that TCRVβ sub-clone T-cells are expanded by their respective activation antibody (FIG. 96).

[1325] In a fourth series of experiments, antibodies tested included the anti-TCRVβ antibodies: BJ1538, BJ1539, BJ1558, BJ1559, BHM1709; and the anti-CD3ε antibody OKT3. The indicated antibodies were coated into a 96-well round bottom plate at concentration of 100 nM or 15 μg/mL at 200 μl/well in PBS at 4° C. overnight or at 37° C. for a minimum of 2 hours. The plate was washed the next day with 2004, of PBS and 0.2×10\hat{ }6 PBMCs/well from donors: 10749, 5078 and 15562 (frozen and thawed samples). Supernatant samples were collected on days 3 and 6. A 10-plex Meso Scale Discovery (MSD) assay was run on the supernatants to determine the concentration of cytokines (including IFN [symbol] , IL-10, IL-17A, IL-1α, IL-1β, IL-6, IL-4, TNFα, and IL-2). The data confirmed that PBMCs cells activated/expanded using any of the anti-TCRβV antibodies—BJ1538, BJ1539, BJ1558, BJ1559, BHM1709—secreted lower levels of IFNγ (FIG. 97A), IL-10 (FIG. 97B), IL-17A (FIG. 97C), IL-1α (FIG. 97D), IL-1β(FIG. 97E), IL-6 (FIG. 97F), IL-4 (FIG. 97G) TNFα (FIG. 9711); and higher levels of IL-2 (FIG. 97I).

[1326] In summary, the data shows that anti-TCRvb antibodies recognizing different TCRvb subfamilies (or subtypes) have a similar cytokine profile and do not induce cytokines associated with CRS.

### Example 34: Anti-TCRvb does not Activate T Cells without Cross-Linking

[1327] To assess whether bivalent anti-TCRvb antibodies activate T cells without cross-linking
[1328] purified T cells from 2 donors were stimulated with anti-TCRvb (TCRvb 6-5 v1) or anti-CD3e (SP34), either plate-coated or in solution. Supernatants were collected at day 1, 3, 5 and 7 post activation. Cytokine secretion was detected using MSD 10 plex kit (IFN-g, IL-10, IL-15, IL-17A, IL-1a, IL-1b, IL-2, IL-4, IL-6 and TNF-α).

[1329] The results show the PBMCs activated/expanded with anti-TCRvb 6-5 v1 antibody in solution do no induce very little IFN [symbol] secretion as compared to PBMCs activated/expanded with anti-TCRvb 6-5 v1 antibody in immobilized (allowing for crosslinking) (FIG. 98A and FIG. 98B). The results show the PBMCs activated/expanded with anti-TCRvb 6-5 v1 antibody in solution do no induce very little or no IL-1b (FIG. 98C), IL-10 (FIG. 98E), IL-15 (FIG. 98F), IL-17A (FIG. 98G), IL-1a (FIG. 98H), IL-1b (FIG. 98I), IL-2 (FIG. 98J), IL-4 (FIG. 98K), IL-6 (FIG. 98D), and TNF-α (FIG. 98L) secretion. In summary, the data shows that anti-CD3ε activates T cells in solution (without crosslinking); while the anti-TCRvb antibodies does not activate T-cells in solution.

### Example 35: Competition of Binding to TCRVB by Two Anti-TCRVβ5-5,5-6 Antibodies with Distinct Sequences

[1330] This Example describes epitope competition of two anti-TCRVβ 5-5,5-6 antibodies for binding to their shared TCRVB antigen. The TM23 and MH3-2 antibodies both bind to TCRVβ5-5,5-6. However, the TM23 and MH3-2 antibodies do not share substantial sequence homology. As shown in FIG. 24A-B, anti-TCRβV antibody molecules disclosed herein recognize a structurally conserved domain on the TCRBV protein (as denoted by the circled area in FIG. 24A), but have low sequence similarity among themselves. To test whether two anti-TCRVβ 5-5,5-6 antibodies which do not share substantial sequence homology, can compete for binding to the TCRBV antigen, a competition assay was carried out.

[1331] Purified MH3-2 antibody was conjugated to AF647. T cells from two donors were preincubated with 500 nM of the TM23 antibody or left untreated. The T cells were then stained with the MH3-2 antibody conjugated to AF647.

[1332] The results show that preincubation of T cells with the TM23 antibody blocks binding of MH3-2 (FIG. 99 and FIG. 100). The data shows that the TM23 antibody competes for binding with the same epitope as the MH3-2 antibody, despite both antibodies having diverse sequences. This data confirms the observation that anti-TCRβV antibody molecules which have low sequence similarities among themselves, bind and recognize a structurally conserved epitope on the TCRBV protein.

### Example 36. Polyfunctional Strength Index of Anti-TCRVβ6-5 Antibody Expanded T Cells

[1333] The polyfunctional strength index (PSI) of PBMCs were compared to anti-CD3ε antibody expanded CD4+ T cell (FIG. 101A) and CD8+ T cells (FIG. 101B) and anti-TCRVβ 6-5 antibody expanded (Drug Expanded T cells) CD4+ T cells (FIG. 101A) and CD8+ T cells (FIG. 101B). PSI is defined as the percentage of polyfunctional cells in the sample, multiplied by the intensities of the secreted cytokines. The data shows that there is a greater upregulation of PSI in the CD4+ T cells (FIG. 101A) and CD8+ T cells (FIG. 101B) across the groups expanded with anti-TCRVβ6-5 antibody.

### Example 37: Binding of TCRVB/CD19 Bispecific to Soluble TCR and Jurkat Cells Expressing TCR

[1334] In this Example, the binding affinity of a TCRVB/CD19 bispecific (FIG. 102A) for the TCR was tested.

[1335] Jurkat cells expressing TRBV6-5 were stained with increasing concentrations of bispecific molecule CD19×TCRvb6-5 (2×2) or control antibody TCRvb6-5 v1 at 4 Celsius for 30 min. Subsequently, the cells were washed with PBS buffer and antibodies bound to the surface of the cells detected by PE-labeled anti-human Fc antibody. The percentage of the positive stained cells were blotted against the concentration. FIG. 102B shows the binding of a TCRVB/CD19 bispecific to soluble TCR. The bispecific molecule binds soluble TCR with a Kd of 12 nM.

[1336] Bispecific CD19×TCRvb6-5 (2×2) antibody was immobilized on a CMS Series S Sensor Chip via Anti-human Fc antibody to 50 RU. Soluble TRBV6-5 antigen was diluted to 500 nM and then serially diluted two-fold. Association was 180 seconds, dissociation was 300 seconds. This assay was run in 1×HBS-EP+ Buffer pH 7.4 and at 25C. The data was fit using a 1:1 binding model. FIG. 102C shows the binding of a TCRVB/CD19 bispecific or the anti-TCRVB 6-5 v1 antibody to TCR expressed on Jurkat cells. The EC50 for the anti-TCRVB 6-5 v1 antibody was 0.6486 and the EC50 for the bispecific molecule was 1.720.

### Example 38: In Vitro and In Vivo Characterization of a Murine Anti-TCRVB Antibody

[1337] This Examples describes the characterization of a murine anti-TCRVB antibody. Similar to the human clonotypes (subfamilies), the TCRb variable chain locus in mice consists of 31 different families with a total of 35 subfamilies of which 23 are functionally expressed. A surrogate TCRvb clonotypical antibody for mice strain C57BL/6 has been identified which shares similar characteristics with the human TCRvb antibodies. This anti-mouse TCRvb antibody binds specifically to TCRvb 13-2 and 13-3 in C57BL/6 mice which are expressed on approximately 15% of all T cells. Similar to the human TCRvb specific antibodies, this murine TCRvb specific antibody (TCRvb 13-2/3) induces murine T cell proliferation and a similar cytokine profile in vitro. The discovery of TCRvb 13-2/3 will enable the evaluation of TCRvb-mediated T cell activation and re-directed cell killing in fully immuno-competent mice models, as well as to assess memory anti-tumor response in vivo.

[1338] FIG. 103A shows the schematic of a bispecific molecule which was used in the following experiments. The bispecific molecule recognizes murine CD19 and murine TCRVB 13-2, 13-3 (also referred to as mCD19×mTCRvb 13-2/3). The bispecific molecule did not bind to mouse Fc gamma receptors.

[1339] First, the in vitro functional activity of the murine bispecific molecule was tested. Splenic mononuclear cells were freshly isolated from C57BL6 mice, treated with mCD19×mTCRvb 13-2/3 (2×2). The isolated cells were assessed for B cell depletion, TCRvβ+ T cell binding, expansion and activation. Cells were treated with 0.0008-200 nM doses (4-fold dilutions) of mCD19×mTCRvb 13-2/3 (2×2) in RPMI-1640 with 10% FBS, or medium alone, for 6 days. On day 3 and 6, cells were analyzed by flow cytometry using the antibodies shown below:

TABLE 23
Antibodies

| Primary Ab | Secondary Ab |
|---|---|
| eFLuor780 | Viability |
| CD20 | A647 |
| CD3 | BV421 |
| TCRVβ 13-2/3 | PE |
| CD25 | FITC |

[1340] FIG. 103B shows that the mCD19×mTCRvb 13-2/3 (2×2) bispecific antibody bound specifically to splenic T cells from C57BL6 mice. Activation and expansion of mTCRvβ+ T cells was observed at day 3 and 6, respectively (FIG. 103C). Following 6 days of treatment, mCD19×mTCRvb 13-2/3 (2×2) induced efficient murine B cell depletion in C57BL6 splenocytes in vitro (FIG. 103D). Taken together, the in vitro characterization shows that mCD19×mTCRvb 13-2/3 (2×2) could serve as a surrogate tool for syngeneic tumor model studies.

[1341] Next, in vivo experiments were performed with the murine bispecific molecule. On day 0, 8 week old female C57BL/6 mice were randomized in to three arms (n=⁵/arm) based on body weight. Mice were intravenously injected once either with PBS, 0.1 mg/kg and 1 mg/kg mCD19×mTCRvb 13-2/3 (2×2). On Day 3 mice were sacrificed and harvested for whole blood and spleen. Tissues were subjected to Flow cytometry and checked for B-cells, NK cells, TCRvb+ cells and CD3+ cells.

[1342] The results show that the murine mCD19×mTCRvb 13-2/3 bispecific molecule depletes B cells in the blood and spleen of animals (FIG. 104). The murine bispecific molecule also expands mouse NK cells in vivo, in the blood and spleen (FIG. 105). The study also demonstrated that mCD19×mTCRvb 13-2/3 (2×2) is well tolerated at the indicated doses and duration of study.

### Example 39: Target Cell Lysis and Cytokine Profile of CD19×TCRvβ Bispecific Molecule

[1343] This Example describes potent lysis of target cells and reduced CRS associated cytokine secretion with a CD19×TCRvβ bispecific molecule.

[1344] To test target cell killing, αTCRvβ6-5 v1 pre-expanded T cells were incubated with Raji target cells in the presence of an CD19×TCRvβ bispecific molecule, CD19×CD3 bispecific molecule or αTCRvβ6-5 v1 antibody (non-targeted) for 24 hours. Target cell lysis was assessed by a KILR Cytotoxicity and Cytokine Quantification as follows. Human PBMCs were isolated from whole blood. From isolated PBMC's, human CD3+ T cells were isolated using magnetic-bead separation (negative selection) (Miltenyi biotec) and activated by immobilized (plate-coated) anti-TCR Vβ13.1 (BHM1709) at 100 nM for 6 days. Activated T-cells (from plate-coated) were then transferred and expanded in tissue culture flask in the presence of human IL-2 at a concentration of 50 U/ml for an additional 2 days. Expanded TCR Vβ13.1 were washed and co-cultured in the presence of CD19-expressing Raji Cells (target cells) at a E:T ratio of 5:1 and serial diluted concentration of T-cell engager bispecific antibodies including, anti-TCR Vβ13.1/CD19 (BJM0093), anti-CD3/CD19 (BJM0030) and anti-TCR Vβ13.1 (BHM1709, serving as control) for 24 hours. Post 24 hours, cell co-culture supernatants were collected and quantified for specific target cell death. Target cells (Raji cells) is a KILR-retroparticles reporter cell assay (DiscoverX).

[1345] KILR-Raji Target cells are engineered to stably express a protein tagged with enhanced ProLabel (ePL), a β-gal reporter fragment, using the KILR Retroparticles, and when its membrane is compromised due to cell death, it will release the tagged protein into the media. The KILR reporter protein is detected in the media/supernatant by the addition of detection reagents containing the enzyme acceptor (EA) fragment of the β-gal reporter. This leads to the formation of the active β-gal enzyme which hydrolyzes the substrate to give a chemiluminescent output (RLU). Percentage (%) of target cell death is calculated using the following formula: (RLU Treatment—RLU No Treatment). FIG. 106B shows the results of this assay. αTCRvβ6-5 v1 pre-expanded T cells (TrEKs) demonstrate efficient killing of Raji target cell at low effector to target ratios of 0.25:1.

[1346] Next, B cell depletion with the CD19×TCRvβ bispecific molecule was tested. Purified T-cells and purified B-cells from the same donor were treated with anti-TCRvβ/CD19 bispecific or Amgen's Blincyto for 2-6 days. B-cell depletion was measured by anti-CD20 staining via FACS analysis. As shown in FIG. 106C-D, CD19×TCRvβ6-5 (2×2) bispecific concept molecule induces B cell depletion 6 days after co-incubation with target cells. A similar result was observed when PBMC's were treated with the anti-TCRvβ/CD19 bispecific or anti-CD3/CD19 bispecific for 1-6 days followed by measurement of B-cell depletion by anti-CD20 staining via FACS analysis (FIG. 106D-E). This data shows that the anti-TCRvβ/CD19 bispecific requires time for differentiation and expansion of TCRvβ+ T cells.

[1347] To determine if the lack of CRS associated cytokine induction by immobilized anti-TCR Vb antibodies can be recapitulated by the bispecific molecule targeting CD19, human PBMCs were incubated in the presence of T cell-activating antibody bispecific molecules at 3 nM. Compounds tested/compared were: CD19×TCRvb and CD19×CD3e. Supernatant were collected on day 1 to day 6, and cytokines were quantified by using MSD.

[1348] FIG. 107A-B show that the CD19×TCRvβ (2×2) bispecific molecule shows increased IL-2 production against a backdrop of delayed and reduced levels of CRS-related cytokines compared to the CD19×CD3e bispecific molecule.

### Example 40: Pharmacokinetic (PK) Profile of CD19×TCRvβ 6-5 (2×2) in Mice

[1349] This Example describes the pharmacokinetic (PK) profile of CD19×TCRvβ 6-5 (2×2) in mice to guide the dosing and/or schedule treatment decision for the efficacy study. The study design is shown in FIG. 108A. Briefly, on day 0, 6-8 week old female NSG mice were implanted subcutaneously with 1×10(6) Raji leukemia cells. On day 2, mice were humanized by injecting 10×10(6) human PBMCs via the peritoneal cavity. On day 9, mice were treated with a single dose of CD19×TCRvβ 6-5 (2×2) intravenously. Serum was harvested from animals by submandibular bleed at 0, 0.5, 1, 6, 24, 48, 72, 96, 148 hours (n=3 per time point). Serum drug concentration was measured by Sandwich ELISA.

[1350] As shown in FIG. 108B and Table 22 below, the serum half-life of CD19×TCRvβ 6-5 (2×2) in tumor bearing humanized NSG animals is approximately 24 hours following a single dose of 1 mg/kg via iv route. This data allowed dose and schedule determination for efficacy studies. Exposures at this dose allow coverage above cellular EC90 beyond 100 hours.

TABLE 22
CD19 × TCRvβ 6-5 PK profile

| Parameter | Value | |
|---|---|---|
| T(½) | 23.89 | h |
| Tmax | 0.5 | h |
| Cmax | 123 | nM |
| AUC0-t | 2436.60 | mol/*h |

### Example 41. Optimization of α-TRBV6-5 Antibody

[1351] The anti TRBV6-5 antibody was optimized to improve affinity for the human and cyno antigen, improve thermal stability, and remove sequence motifs that might pose chemical stability liabilities. ScFv libraries were built using random mutagenesis (Caldwell et al. (1992) Randomization of genes by PCR mutagenesis. PCR Meth. Appl. 2:28) or a modified version of Kunkel mutagenesis (Kunkel T A. (1985) Rapid and efficient site-specific mutagenesis without phenotypic selection. PNAS 82(2): 488-92). For affinity improvement, library selections vs human and cyno antigens were performed using standard phage display (Lee, C M et al. (2007) Selection of human antibody fragments by phage display. Nature protocols 2, 3001) and yeast display techniques (Chao G, et al. (2006) Isolating and engineering human antibodies using yeast surface display. Nature Protocols. 1(2):755-69). Thermal challenge of phage or yeast populations was used to select for clones with improved thermal stability. Selections were followed by standard screening methods such as ELISA and flow cytometry to identify individual clones with improved properties. Following hit sequencing and analysis of mutation-activity correlation, second-generation libraries were constructed using the same methods above. Library selections and individual clone screening were repeated as above with the modification that more stringent conditions were applied to select for clones with maximized activity. Following hit sequencing, scFv genes were reformatted into the biologically relevant antibody format for expression, purification, and triaging.

### EXEMPLARY EMBODIMENTS

[1352] Disclosed herein are, inter alia, antibody molecules directed to the variable chain of the beta subunit of TCR (TCRβV) which bind and, e.g., activate or expand, T cells, e.g., a subset of T cells (“anti-TCRβV antibody molecules”). In some embodiments, the anti-TCRβV antibody molecules disclosed herein result in a cytokine profile, e.g., a cytokine secretion profile, that differs from that of a T cell engager that binds to a receptor or molecule other than a TCRβV region (“a non-TCRβV-binding T cell engager”). In some embodiments, the anti-TCRβV antibody molecules disclosed herein result in lesser, minimal, or no production of cytokines associated with cytokine release syndrome (CRS), e.g., IL-6, IL-1beta, IL-10 and TNF alpha; and enhanced and/or delayed production of IL-2 and IFN-gamma. In some embodiments, the anti-TCRβV antibodies disclosed herein result in expansion of an immune cell, e.g., a T cell, a tumor infiltrating lymphocyte (TIL), an NK cell, or other immune cells (e.g., as described herein). Also provided herein are methods of making said anti-TCRβV antibody molecules, and methods of using said anti-TCRβV antibody molecules including, methods of using an anti-TCRβV antibody molecule for expanding an immune cell or an immune cell population, and method of using an anti-TCRβV antibody molecule for treating cancer, including the use as combination therapy with TIL and immune checkpoint therapeutics. This disclosure further provides multispecific molecules, e.g., bispecific molecules, comprising said anti-TCRβV antibody molecules. In some embodiments, compositions comprising anti-TCRβV antibody molecules of the present disclosure, can be used, e.g., to activate and/or redirect T cells to promote tumor cell lysis for cancer immunotherapy. In some embodiments, compositions comprising anti-TCRβV antibody molecules as disclosed herein limit the unwanted side-effects of CRS and/or NT, e.g., CRS and/or NT associated with anti-CD3e targeting.

[1353] In some embodiments, the anti-TCRβV antibody molecules disclosed herein result in lesser, minimal, or no production of cytokines associated with cytokine release syndrome (CRS), e.g., IL-6, IL-1beta, IL-10 and TNF alpha; and enhanced and/or delayed production of IL-2 and IFN-gamma, compared with an anti-CD3 antibody molecule (e.g., a low affinity anti-CD3 antibody molecule). In some embodiments, administration of the anti-TCRβV antibody molecules disclosed herein in a subject results in reduced cytokine release syndrome (CRS) (e.g., lesser duration of CRS or no CRS), a reduced severity of CRS (e.g., absence of severe CRS, e.g., CRS grade 4 or 5), reduced neurotoxicity (NT), or a reduced severity of NT, compared with similar administration of an anti-CD3 antibody molecule (e.g., a low affinity anti-CD3 antibody molecule).

[1354] Accordingly, provided herein are, anti-TCRβV antibody molecules, multispecific or multifunctional molecules (e.g., multispecific or multifunctional antibody molecules) (also referred to herein as a “composition”) that comprise anti-TCRβV antibody molecules, nucleic acids encoding the same, methods of producing the aforesaid molecules, pharmaceutical compositions comprising aforesaid molecules, and methods of treating a disease or disorder, e.g., cancer, using the aforesaid molecules. The antibody molecules and pharmaceutical compositions disclosed herein can be used (alone or in combination with other agents or therapeutic modalities) to treat, prevent and/or diagnose disorders and conditions, e.g., cancer, e.g., as described herein.

[1355] In one aspect, the disclosure provides an antibody molecule, e.g., a non-murine, e.g., a human-like (e.g., a human, or humanized antibody molecule), which binds, e.g., specifically binds, to a T cell receptor beta variable (TCRβV) region.

[1356] In some embodiments, the anti-TCRBV antibody molecule comprises an antigen binding domain of an antibody disclosed in any of Tables 1-2, or 10-13, or a sequence with at least 85%, 90%, 95%, 96%, 97%, 98%, or 99% identity thereto. In some embodiments, the anti-TCRBV antibody molecule comprises a leader sequence comprising the amino acid sequence of SEQ ID NO: 3288. In some embodiments, the anti-TCRBV antibody molecule does not comprise a leader sequence comprising the amino acid sequence of SEQ ID NO: 3288.

[1357] In some embodiments, binding of the anti-TCRβV antibody molecule to a TCRβV region results in a cytokine profile, e.g., a cytokine secretion profile, (e.g., comprising one or more cytokines and/or one or more chemokines), that differs from that of a T cell engager that binds to a receptor or molecule other than a TCRβV region (“a non-TCRβV-binding T cell engager”).

[1358] In some embodiments, the cytokine profile, e.g., cytokine secretion profile, comprises one, two, three, four, five, six, seven, or all of the following:

[1359] (i) increased level, e.g., expression level, and/or activity of IL-2;

[1360] (ii) reduced level, e.g., expression level, and/or activity of IL-1β;

[1361] (iii) reduced level, e.g., expression level, and/or activity of IL-6;

[1362] (iv) reduced level, e.g., expression level, and/or activity of TNFα;

[1363] (v) reduced level, e.g., expression level, and/or activity of IL-10;

[1364] (vi) a delay, e.g., at least 1, 2, 3, 4, 5, 6, 7, 8, 9, 10 or more hours delay, in increased level, e.g., expression level, and/or activity of IL-2;

[1365] (vii) a delay, e.g., at least 1, 2, 3, 4, 5, 6, 7, 8, 9, 10 hours delay, in increased level, e.g., expression level, and/or activity of IFN-gamma; or

[1366] (viii) increased level, e.g., expression level, and/or activity of IL-15, e.g., wherein (i)-(viii) are relative to the cytokine profile, e.g., cytokine secretion profile, of the non-TCRβV-binding T cell engager.

[1367] In some embodiments, binding of the anti-TCRBV antibody to a TCRβV region results in reduced cytokine storm, e.g., reduced cytokine release syndrome (CRS) and/or neurotoxicity (NT), as measured by an assay of Example 3, e.g., relative to the cytokine storm induced by the non-TCRβV-binding T cell engager.

[1368] In some embodiments, binding of the anti-TCRBV antibody to a TCRβV region results in one, two, three or all of:

[1369] (ix) reduced T cell proliferation kinetics;

[1370] (x) cell killing, e.g., target cell killing, e.g. cancer cell killing, e.g., as measured by an assay of Example 4;

[1371] (xi) increased Natural Killer (NK) cell proliferation, e.g., expansion; or

[1372] (xii) expansion, e.g., at least about 1.1-10 fold expansion (e.g., at least about 1.1, 1.2, 1.3, 1.4, 1.5, 2, 3, 4, 5, 6, 7, 8, 9, or 10 fold expansion), of a population of T cells having a memory-like phenotype, e.g., as described herein,

[1373] e.g., wherein (ix)-(xii) are relative to the non-TCRβV-binding T cell engager.

[1374] In some embodiments, an anti-TCRβV antibody molecule disclosed herein recognizes (e.g., binds to), a structurally conserved domain on the TCRβV protein (e.g., as denoted by the circled area in FIG. 24A).

[1375] In some embodiments, an anti-TCRVβ antibody disclosed herein comprises an Fc region, e.g., as described herein. In some embodiments, the Fc region is a wildtype Fc region, e.g., a wildtype human Fc region. In some embodiments, the Fc region comprises a variant, e.g., an Fc region comprising an addition, substitution, or deletion of at least one amino acid residue in the Fc region which results in, e.g., reduced affinity for and/or binding to, at least one Fc receptor. In some embodiments, the reduced affinity is compared to an otherwise similar antibody with a wildtype Fc region.

[1376] In some embodiments, an anti-TCRVβ antibody comprising a variant Fc region has one or more of the following properties: (1) reduced effector function (e.g., reduced ADCC, ADCP and/or CDC); (2) reduced binding to one or more Fc receptors; and/or (3) reduced binding to C1q complement. In some embodiments, the reduction in any one, or all of properties (1)-(3) is compared to an otherwise similar antibody with a wildtype Fc region.

[1377] In some embodiments, an anti-TCRVβ antibody comprising a variant Fc region has reduced affinity to a human Fc receptor, e.g., FcγR I, FcγR II and/or FcγR III. In some embodiments, the anti-TCRVβ antibody comprising a variant Fc region comprises a human IgG1 region or a human IgG4 region.

[1378] In some embodiments, an anti-TCRVβ antibody disclosed herein comprises any one or all, or any combination of Fc region variants, e.g., mutations, disclosed in Table 21. In some embodiments, an anti-TCRVβ antibody disclosed herein comprise an Asn297Ala (N297A) mutation. In some embodiments, an anti-TCRVβ antibody disclosed herein comprise a Leu234A1a/Leu235Ala (LALA) mutation.

[1379] In some embodiments, an anti-TCRβV antibody molecule disclosed herein does not recognize, e.g., bind to, an interface of a TCRβV:TCRalpha complex.

[1380] In some embodiments, an anti-TCRβV antibody molecule disclosed herein does not recognize, e.g., bind to, a constant region of a TCRβV protein. An exemplary antibody that binds to a constant region of a TCRBV region is JOVI. 1 as described in Viney et al., (Hybridoma. 1992 December; 11(6):701-13).

[1381] In some embodiments, an anti-TCRβV antibody molecule disclosed herein does not recognize, e.g., bind to, one or more (e.g., all) of a complementarity determining region (e.g., CDR1, CDR2 and/or CDR3) of a TCRβV protein.

[1382] In some embodiments, binding of the anti-TCRβV antibody molecule to a TCRβV region results in one, two, three, four, five, six, seven, eight, nine, ten or more (e.g., all) of the following:

[1383] (i) reduced level, e.g., expression level, and/or activity of IL-10;

[1384] (ii) reduced level, e.g., expression level, and/or activity of IL-6;

[1385] (iii) reduced level, e.g., expression level, and/or activity of TNFα;

[1386] (iv) increased level, e.g., expression level, and/or activity of IL-2;

[1387] (v) a delay, e.g., at least 1, 2, 3, 4, 5, 6, 7, 8, 9, 10 or more hours delay, in increased level, e.g., expression level, and/or activity of IL-2;

[1388] (vi) a delay, e.g., at least 1, 2, 3, 4, 5, 6, 7, 8, 9, 10 hours delay, in increased level, e.g., expression level, and/or activity of IFN-gamma;

[1389] (vii) reduced T cell proliferation kinetics;

[1390] (viii) reduced cytokine storm, e.g., cytokine release syndrome (CRS) and/or neurotoxicity (NT), e.g., as measured by an assay of Example 3;

[1391] (ix) cell killing, e.g., target cell killing, e.g. cancer cell killing, e.g., as measured by an assay of Example 4;

[1392] (x) increased level, e.g., expression level, and/or activity of IL-15; or

[1393] (xi) increased Natural Killer (NK) cell proliferation, e.g., expansion.

[1394] In some embodiments, any one or all of (i)-(xi) or any combination thereof resulting from an anti-TCRβV antibody molecule disclosed herein is compared to an antibody that binds to: a CD3 molecule, e.g., CD3 epsilon (CD3e) molecule; or a TCR alpha (TCRα) molecule.

[1395] In some embodiments, binding of the anti-TCRβV antibody molecule to a TCRβV region results in secretion, e.g., production of perforin and/or Granzyme B.

[1396] In an aspect, the disclosure provides an antibody molecule which binds, e.g., specifically binds, to a T cell receptor beta variable chain (TCRβV) region, wherein the anti-TCRβV antibody molecule comprises an antigen binding domain comprising:

[1397] (a) a light chain variable region (VL) comprising:

[1398] (i) one, two or all of (e.g., three) a light chain complementarity determining region 1 (LC CDR1), a light chain complementarity determining region 2 (LC CDR2), and a light chain complementarity determining region 3 (LC CDR3) of SEQ ID NO: 10 or SEQ ID NO: 11; and

[1399] (ii) a framework region (FR) having at least 95% identity with one, two, three, or all of (e.g., four) a non-murine germline framework 1 (FR1), a non-murine germline framework region 2 (FR2), a non-murine germline framework region 3 (FR3), and a non-murine germline framework region 4 (FR4); and/or

[1400] (b) a heavy chain variable region (VH) comprising:

[1401] (i) one, two or all of (e.g., three) a heavy chain complementarity determining region 1 (HC CDR1), a heavy chain complementarity determining region 2 (HC CDR2) and a heavy chain complementarity determining region 3 (HC CDR3) of SEQ ID NO: 9; and

[1402] (ii) a framework region (FR) having at least 95% identity with one, two, three, or all of (e.g., four) a non-murine germline framework 1 (FR1), a non-murine germline framework region 2 (FR2), a non-murine germline framework region 3 (FR3), and a non-murine germline framework region 4 (FR4).

[1403] In some embodiments, the VL comprises a sequence having a consensus sequence of SEQ ID NO: 230 or 3289.

[1404] In some embodiments, the VH comprises a sequence having a consensus sequence of SEQ ID NO: 231 or 3290.

[1405] In some embodiments, the anti-TCRβV antibody molecule binds to TCRβ V6, e.g., one or more of TCRβ V6-4*01, TCRβ V6-4*02, TCRβ V6-9*01, TCRβ V6-8*01, TCRβ V6-5*01, TCRβ V6-6*02, TCRβ V6-6*01, TCRβ V6-2*01, TCRβ V6-3*01 or TCRβ V6-1*01, or a variant thereof.

[1406] In some embodiment, the anti-TCRβV antibody molecule comprises an antigen binding domain comprising:

[1407] (i) a HC CDR1, a HC CDR2 and a HC CDR3 of SEQ ID NO: 1 or SEQ ID NO: 9, or an amino acid sequence listed in Table 1; or

[1408] (ii) a LC CDR1, a LC CDR2, and a LC CDR3 of SEQ ID NO: 2, SEQ ID NO: 10 or SEQ ID NO: 11, or an amino acid sequence listed in Table 1.

[1409] In some embodiments, the anti-TCRβV antibody molecule comprises an antigen binding domain comprising a light chain variable region (VL) comprising one, two or all (e.g., three) of a LC CDR1, a LC CDR2 and a LC CDR3 of SEQ ID NO: 2, SEQ ID NO: 10 or SEQ ID NO: 11, or an amino acid sequence listed in Table 1.

[1410] In some embodiments, the anti-TCRβV antibody molecule comprises an antigen binding domain comprising a heavy chain variable region (VH) comprising one, two or all (e.g., three) of a HC CDR1, a HC CDR2 and a HC CDR3 of SEQ ID NO:1 or SEQ ID NO: 9, or an amino acid sequence listed in Table 1.

[1411] In some embodiments, the anti-TCRβV antibody molecule comprises an antigen binding domain comprising:

[1412] (i) a VL comprising: a LC CDR1 amino acid sequence of SEQ ID NO: 6 (or an amino acid sequence with not more than 1, 2, 3 or 4 modifications, e.g., substitutions, additions or deletions thereof), a LC CDR2 amino acid sequence of SEQ ID NO:7 (or an amino acid sequence with not more than 1, 2, 3 or 4 modifications, e.g., substitutions, additions or deletions thereof), and/or a LC CDR3 amino acid sequence of SEQ ID NO:8 (or an amino acid sequence with not more than 1, 2, 3 or 4 modifications, e.g., substitutions, additions or deletions thereof); and/or

[1413] (ii) a VH comprising: a HC CDR1 amino acid sequence of SEQ ID NO: 3 (or an amino acid sequence with not more than 1, 2, 3 or 4 modifications, e.g., substitutions, additions or deletions thereof), a HC CDR2 amino acid sequence of SEQ ID NO:4 (or an amino acid sequence with not more than 1, 2, 3 or 4 modifications, e.g., substitutions, additions or deletions thereof), and/or a HC CDR3 amino acid sequence of SEQ ID NO:5 (or an amino acid sequence with not more than 1, 2, 3 or 4 modifications, e.g., substitutions, additions or deletions thereof).

[1414] In some embodiments, the anti-TCRβV antibody molecule comprises an antigen binding domain comprising:

[1415] a variable heavy chain (VH) of an amino acid sequence listed in Table 1, e.g., SEQ ID NO: 9, or a sequence having at least about 85%, 90%, 95%, or 99% sequence identity to an amino acid sequence listed in Table 1, e.g., SEQ ID NO: 9 or SEQ ID NO: 1312; and/or

[1416] a variable light chain (VL) of an amino acid sequence listed in Table 1, e.g., SEQ ID NO: 10 or SEQ ID NO: 11, or a sequence having at least about 85%, 90%, 95%, or 99% sequence identity to an amino acid sequence listed in Table 1, e.g., SEQ ID NO: 10 or SEQ ID NO: 11 or SEQ ID NO: 1314.

[1417] In some embodiments, the anti-TCRβV antibody molecule comprises an antigen binding domain comprising:

[1418] (i) the VH amino acid sequence of SEQ ID NO: 9 or SEQ ID NO: 1312;

[1419] (ii) an amino acid sequence having at least about 85%, 90%, 95%, or 99% sequence identity to the amino acid sequence of SEQ ID NO: 9 or SEQ ID NO: 1312;

[1420] (iii) the VL amino acid sequence of SEQ ID NO: 10 or SEQ ID NO: 1314; and/or

[1421] (iv) an amino acid sequence having at least about 85%, 90%, 95%, or 99% sequence identity to the amino acid sequence of SEQ ID NO: 10 or SEQ ID NO: 1314.

[1422] In an aspect, provided herein is an antibody molecule which binds, e.g., specifically binds, to a T cell receptor beta variable chain (TCRβV) region, wherein the anti-TCRβV antibody molecule comprises an antigen binding domain comprising:

[1423] (a) a light chain variable region (VL) comprising:

[1424] (i) one, two or all of (e.g., three) a light chain complementarity determining region 1 (LC CDR1), a light chain complementarity determining region 2 (LC CDR2), and a light chain complementarity determining region 3 (LC CDR3) of a humanized B-H light chain (LC) of Table 2; and

[1425] (ii) a framework region (FR) having at least 95% identity with one, two, three or all (e.g., four) of a framework region 1 (FR1), a framework region 2 (FR2), a framework region 3 (FR3), and a framework region 4 (FR4) of a humanized B-H LC of Table 2; and/or

[1426] (b) a heavy chain variable region (VH) comprising:

[1427] (i) one, two or all of (e.g., three) a heavy chain complementarity determining region 1 (HC CDR1), a heavy chain complementarity determining region 2 (HC CDR2) and a heavy chain complementarity determining region 3 (HC CDR3) of a humanized B-H heavy chain (HC) of Table 2; and

[1428] (ii) a framework region (FR) having at least 95% identity with one, two, three or all (e.g., four) of a framework region 1 (FR1), a framework region 2 (FR2), a framework region 3 (FR3), and a framework region 4 (FR4) of a humanized B-H HC of Table 2.

[1429] In some embodiments, the anti-TCRBV binds to TCRβ V12, e.g., TCRβ V12-4*01, TCRβ V12-3*01, or TCRβ V12-5*01, or a variant thereof.

[1430] In some embodiment, the anti-TCRβV antibody molecule comprises an antigen binding domain comprising:

[1431] (i) a HC CDR1, a HC CDR2 and a HC CDR3 of Antibody B listed in Table 2; or

[1432] (ii) a LC CDR1, a LC CDR2, and a LC CDR3 of Antibody B listed in Table 2.

[1433] In some embodiments, the anti-TCRβV antibody molecule comprises an antigen binding domain comprising a light chain variable region (VL) comprising one, two or all (e.g., three) of a LC CDR1, a LC CDR2 and a LC CDR3 of a humanized B-H antibody listed in Table 2.

[1434] In some embodiments, the anti-TCRβV antibody molecule comprises an antigen binding domain comprising a heavy chain variable region (VH) comprising one, two or all (e.g., three) of a HC CDR1, a HC CDR2 and a HC CDR3 of a humanized B-H antibody listed in Table 2.

[1435] In some embodiments, the anti-TCRβV antibody molecule comprises an antigen binding domain comprising a light chain variable region (VL) comprising one, two or all (e.g., three) of a LC CDR1, a LC CDR2 and a LC CDR3 of a humanized B-H antibody listed in Table 2.

[1436] In some embodiments, the anti-TCRβV antibody molecule comprises:

[1437] a VH sequence of a humanized B-H antibody listed in Table 2, or a sequence having at least about 85%, 90%, 95%, or 99% sequence identity to a VH of a humanized B-H antibody listed in Table 2; and/or

[1438] a VL sequence of a humanized B-H antibody listed in Table 2, or a sequence having at least about 85%, 90%, 95%, or 99% sequence identity to a VL of a humanized B-H antibody listed in Table 2.

[1439] In some embodiments, the anti-TCRβV antibody molecule comprises a framework region (FR) having at least 95% identity with one of: a FR1, a FR2, a FR3, and a FR4 of a humanized B-H LC of Table 2.

[1440] In some embodiments, the anti-TCRβV antibody molecule comprises a framework region (FR) having at least 95% identity with any two of: a FR1, a FR2, a FR3, and a FR4 of a humanized B-H LC of Table 2.

[1441] In some embodiments, the anti-TCRβV antibody molecule comprises a framework region (FR) having at least 95% identity with any three of: a FR1, a FR2, a FR3, and a FR4 of a humanized B-H LC of Table 2.

[1442] In some embodiments, the anti-TCRβV antibody molecule comprises a framework region (FR) having at least 95% identity with all of: a FR1, a FR2, a FR3, and a FR4 of a humanized B-H LC of Table 2.

[1443] In some embodiments, the anti-TCRβV antibody molecule comprises a framework region (FR) having at least 95% identity with one of: a FR1, a FR2, a FR3, and a FR4 of a humanized B-H HC of Table 2.

[1444] In some embodiments, the anti-TCRβV antibody molecule comprises a framework region (FR) having at least 95% identity with any two of: a FR1, a FR2, a FR3, and a FR4 of a humanized B-H HC of Table 2.

[1445] In some embodiments, the anti-TCRβV antibody molecule comprises a framework region (FR) having at least 95% identity with any three of: a FR1, a FR2, a FR3, and a FR4 of a humanized B-H HC of Table 2.

[1446] In some embodiments, the anti-TCRβV antibody molecule comprises a framework region (FR) having at least 95% identity with all of: a FR1, a FR2, a FR3, and a FR4 of a humanized B-H HC of Table 2.

[1447] In some embodiment, the anti-TCRβV antibody molecule comprises an antigen binding domain comprising:

[1448] (i) a HC CDR1, a HC CDR2 and a HC CDR3 of Antibody C listed in Table 10; or

[1449] (ii) a LC CDR1, a LC CDR2, and a LC CDR3 of Antibody C listed in Table 10.

[1450] In some embodiments, the anti-TCRβV antibody molecule comprises an antigen binding domain comprising a heavy chain variable region (VH) comprising one, two or all (e.g., three) of a HC CDR1, a HC CDR2 and a HC CDR3 of antibody C or humanized C-H antibody listed in Table 10.

[1451] In some embodiments, the anti-TCRβV antibody molecule comprises an antigen binding domain comprising a light chain variable region (VL) comprising one, two or all (e.g., three) of a LC CDR1, a LC CDR2 and a LC CDR3 of antibody C or humanized C-H antibody listed in Table 10.

[1452] In some embodiments, the anti-TCRβV antibody molecule comprises:

[1453] a VH sequence of a humanized C-H antibody listed in Table 10, or a sequence having at least about 85%, 90%, 95%, or 99% sequence identity to a VH of a humanized C-H antibody listed in Table 10; and/or

[1454] a VL sequence of a humanized C-H antibody listed in Table 10, or a sequence having at least about 85%, 90%, 95%, or 99% sequence identity to a VL of a humanized C-H antibody listed in Table 10.

[1455] In some embodiment, the anti-TCRβV antibody molecule comprises an antigen binding domain comprising:

[1456] (i) a HC CDR1, a HC CDR2 and a HC CDR3 of Antibody E listed in Table 11; or

[1457] (ii) a LC CDR1, a LC CDR2, and a LC CDR3 of Antibody E listed in Table 11.

[1458] In some embodiments, the anti-TCRβV antibody molecule comprises an antigen binding domain comprising a heavy chain variable region (VH) comprising one, two or all (e.g., three) of a HC CDR1, a HC CDR2 and a HC CDR3 of antibody E or humanized E-H antibody listed in Table 11.

[1459] In some embodiments, the anti-TCRβV antibody molecule comprises an antigen binding domain comprising a light chain variable region (VL) comprising one, two or all (e.g., three) of a LC CDR1, a LC CDR2 and a LC CDR3 of antibody E or humanized E-H antibody listed in Table 11.

[1460] In some embodiments, the anti-TCRβV antibody molecule comprises:

[1461] a VH sequence of a humanized E-H antibody listed in Table 11, or a sequence having at least about 85%, 90%, 95%, or 99% sequence identity to a VH of a humanized E-H antibody listed in Table 11; and/or

[1462] a VL sequence of a humanized E-H antibody listed in Table 11, or a sequence having at least about 85%, 90%, 95%, or 99% sequence identity to a VL of a humanized E-H antibody listed in Table 11.

[1463] In some embodiment, the anti-TCRβV antibody molecule comprises an antigen binding domain comprising:

[1464] (i) a HC CDR1, a HC CDR2 and a HC CDR3 of Antibody D listed in Table 12; or

[1465] (ii) a LC CDR1, a LC CDR2, and a LC CDR3 of Antibody D listed in Table 12.

[1466] In some embodiments, the anti-TCRβV antibody molecule comprises an antigen binding domain comprising a heavy chain variable region (VH) comprising one, two or all (e.g., three) of a HC CDR1, a HC CDR2 and a HC CDR3 of antibody D or humanized D-H antibody listed in Table 12.

[1467] In some embodiments, the anti-TCRβV antibody molecule comprises an antigen binding domain comprising a light chain variable region (VL) comprising one, two or all (e.g., three) of a LC CDR1, a LC CDR2 and a LC CDR3 of antibody D or humanized D-H antibody listed in Table 12.

[1468] In some embodiments, the anti-TCRβV antibody molecule comprises:

[1469] a VH sequence of a humanized D-H antibody listed in Table 12, or a sequence having at least about 85%, 90%, 95%, or 99% sequence identity to a VH of a humanized D-H antibody listed in Table 12; and/or

[1470] a VL sequence of a humanized D-H antibody listed in Table 12, or a sequence having at least about 85%, 90%, 95%, or 99% sequence identity to a VL of a humanized D-H antibody listed in Table 12.

[1471] In some embodiment, the anti-TCRβV antibody molecule comprises an antigen binding domain comprising:

[1472] (i) a HC CDR1, a HC CDR2 and a HC CDR3 of Antibody G listed in Table 13; or

[1473] (ii) a LC CDR1, a LC CDR2, and a LC CDR3 of Antibody G listed in Table 13.

[1474] In some embodiments, the anti-TCRβV antibody molecule comprises an antigen binding domain comprising a heavy chain variable region (VH) comprising one, two or all (e.g., three) of a HC CDR1, a HC CDR2 and a HC CDR3 of antibody G or humanized G-H antibody listed in Table 13.

[1475] In some embodiments, the anti-TCRβV antibody molecule comprises an antigen binding domain comprising a light chain variable region (VL) comprising one, two or all (e.g., three) of a LC CDR1, a LC CDR2 and a LC CDR3 of antibody G or humanized G-H antibody listed in Table 13.

[1476] In some embodiments, the anti-TCRβV antibody molecule comprises:

[1477] a VH sequence of a humanized G-H antibody listed in Table 13, or a sequence having at least about 85%, 90%, 95%, or 99% sequence identity to a VH of a humanized G-H antibody listed in Table 13; and/or

[1478] a VL sequence of a humanized G-H antibody listed in Table 13, or a sequence having at least about 85%, 90%, 95%, or 99% sequence identity to a VL of a humanized G-H antibody listed in Table 13.

[1479] In some embodiment, the anti-TCRβV antibody molecule comprises an antigen binding domain comprising:

[1480] (i) a HC CDR1, a HC CDR2 and a HC CDR3 of Antibody H listed in Table 13; or

[1481] (ii) a LC CDR1, a LC CDR2, and a LC CDR3 of Antibody H listed in Table 13.

[1482] In some embodiments, the anti-TCRβV antibody molecule comprises an antigen binding domain comprising a heavy chain variable region (VH) comprising one, two or all (e.g., three) of a HC CDR1, a HC CDR2 and a HC CDR3 of antibody H or humanized H-H antibody listed in Table 13.

[1483] In some embodiments, the anti-TCRβV antibody molecule comprises an antigen binding domain comprising a light chain variable region (VL) comprising one, two or all (e.g., three) of a LC CDR1, a LC CDR2 and a LC CDR3 of antibody H or humanized H-H antibody listed in Table 13.

[1484] In some embodiments, the anti-TCRβV antibody molecule comprises:

[1485] a VH sequence of a humanized H-H antibody listed in Table 13, or a sequence having at least about 85%, 90%, 95%, or 99% sequence identity to a VH of a humanized H-H antibody listed in Table 13; and/or

[1486] a VL sequence of a humanized H-H antibody listed in Table 13, or a sequence having at least about 85%, 90%, 95%, or 99% sequence identity to a VL of a humanized H-H antibody listed in Table 13.

[1487] In some embodiment, the anti-TCRβV antibody molecule comprises an antigen binding domain comprising:

[1488] (i) a HC CDR1, a HC CDR2 and a HC CDR3 of Antibody I listed in Table 13; or

[1489] (ii) a LC CDR1, a LC CDR2, and a LC CDR3 of Antibody I listed in Table 13.

[1490] In some embodiments, the anti-TCRβV antibody molecule comprises an antigen binding domain comprising a heavy chain variable region (VH) comprising one, two or all (e.g., three) of a HC CDR1, a HC CDR2 and a HC CDR3 of antibody I or humanized I-H antibody listed in Table 13.

[1491] In some embodiments, the anti-TCRβV antibody molecule comprises an antigen binding domain comprising a light chain variable region (VL) comprising one, two or all (e.g., three) of a LC CDR1, a LC CDR2 and a LC CDR3 of antibody I or humanized I-H antibody listed in Table 13.

[1492] In some embodiments, the anti-TCRβV antibody molecule comprises:

[1493] a VH sequence of a humanized I-H antibody listed in Table 13, or a sequence having at least about 85%, 90%, 95%, or 99% sequence identity to a VH of a humanized I-H antibody listed in Table 13; and/or

[1494] a VL sequence of a humanized I-H antibody listed in Table 13, or a sequence having at least about 85%, 90%, 95%, or 99% sequence identity to a VL of a humanized I-H antibody listed in Table 13.

[1495] In some embodiment, the anti-TCRβV antibody molecule comprises an antigen binding domain comprising:

[1496] (i) a HC CDR1, a HC CDR2 and a HC CDR3 of Antibody J listed in Table 13; or

[1497] (ii) a LC CDR1, a LC CDR2, and a LC CDR3 of Antibody J listed in Table 13.

[1498] In some embodiments, the anti-TCRβV antibody molecule comprises an antigen binding domain comprising a heavy chain variable region (VH) comprising one, two or all (e.g., three) of a HC CDR1, a HC CDR2 and a HC CDR3 of antibody J or humanized J-H antibody listed in Table 13.

[1499] In some embodiments, the anti-TCRβV antibody molecule comprises an antigen binding domain comprising a light chain variable region (VL) comprising one, two or all (e.g., three) of a LC CDR1, a LC CDR2 and a LC CDR3 of antibody J or humanized J-H antibody listed in Table 13.

[1500] In some embodiments, the anti-TCRβV antibody molecule comprises:

[1501] a VH sequence of a humanized J-H antibody listed in Table 13, or a sequence having at least about 85%, 90%, 95%, or 99% sequence identity to a VH of a humanized J-H antibody listed in Table 13; and/or

[1502] a VL sequence of a humanized J-H antibody listed in Table 13, or a sequence having at least about 85%, 90%, 95%, or 99% sequence identity to a VL of a humanized J-H antibody listed in Table 13.

[1503] In some embodiment, the anti-TCRβV antibody molecule comprises an antigen binding domain comprising:

[1504] (i) a HC CDR1, a HC CDR2 and a HC CDR3 of Antibody K listed in Table 13; or

[1505] (ii) a LC CDR1, a LC CDR2, and a LC CDR3 of Antibody K listed in Table 13.

[1506] In some embodiments, the anti-TCRβV antibody molecule comprises an antigen binding domain comprising a heavy chain variable region (VH) comprising one, two or all (e.g., three) of a HC CDR1, a HC CDR2 and a HC CDR3 of antibody K or humanized K-H antibody listed in Table 13.

[1507] In some embodiments, the anti-TCRβV antibody molecule comprises an antigen binding domain comprising a light chain variable region (VL) comprising one, two or all (e.g., three) of a LC CDR1, a LC CDR2 and a LC CDR3 of antibody K or humanized K-H antibody listed in Table 13.

[1508] In some embodiments, the anti-TCRβV antibody molecule comprises:

[1509] a VH sequence of a humanized G-H antibody listed in Table 13, or a sequence having at least about 85%, 90%, 95%, or 99% sequence identity to a VH of a humanized K-H antibody listed in Table 13; and/or

[1510] a VL sequence of a humanized G-H antibody listed in Table 13, or a sequence having at least about 85%, 90%, 95%, or 99% sequence identity to a VL of a humanized K-H antibody listed in Table 13.

[1511] In some embodiment, the anti-TCRβV antibody molecule comprises an antigen binding domain comprising:

[1512] (i) a HC CDR1, a HC CDR2 and a HC CDR3 of Antibody L listed in Table 13; or

[1513] (ii) a LC CDR1, a LC CDR2, and a LC CDR3 of Antibody L listed in Table 13.

[1514] In some embodiments, the anti-TCRβV antibody molecule comprises an antigen binding domain comprising a heavy chain variable region (VH) comprising one, two or all (e.g., three) of a HC CDR1, a HC CDR2 and a HC CDR3 of antibody L or humanized L-H antibody listed in Table 13.

[1515] In some embodiments, the anti-TCRβV antibody molecule comprises an antigen binding domain comprising a light chain variable region (VL) comprising one, two or all (e.g., three) of a LC CDR1, a LC CDR2 and a LC CDR3 of antibody L or humanized L-H antibody listed in Table 13.

[1516] In some embodiments, the anti-TCRβV antibody molecule comprises:

[1517] a VH sequence of a humanized L-H antibody listed in Table 13, or a sequence having at least about 85%, 90%, 95%, or 99% sequence identity to a VH of a humanized L-H antibody listed in Table 13; and/or

[1518] a VL sequence of a humanized L-H antibody listed in Table 13, or a sequence having at least about 85%, 90%, 95%, or 99% sequence identity to a VL of a humanized L-H antibody listed in Table 13.

[1519] In some embodiment, the anti-TCRβV antibody molecule comprises an antigen binding domain comprising:

[1520] (i) a HC CDR1, a HC CDR2 and a HC CDR3 of Antibody M listed in Table 13; or

[1521] (ii) a LC CDR1, a LC CDR2, and a LC CDR3 of Antibody M listed in Table 13.

[1522] In some embodiments, the anti-TCRβV antibody molecule comprises an antigen binding domain comprising a heavy chain variable region (VH) comprising one, two or all (e.g., three) of a HC CDR1, a HC CDR2 and a HC CDR3 of antibody M or humanized M-H antibody listed in Table 13.

[1523] In some embodiments, the anti-TCRβV antibody molecule comprises an antigen binding domain comprising a light chain variable region (VL) comprising one, two or all (e.g., three) of a LC CDR1, a LC CDR2 and a LC CDR3 of antibody M or humanized M-H antibody listed in Table 13.

[1524] In some embodiments, the anti-TCRβV antibody molecule comprises:

[1525] a VH sequence of a humanized M-H antibody listed in Table 13, or a sequence having at least about 85%, 90%, 95%, or 99% sequence identity to a VH of a humanized M-H antibody listed in Table 13; and/or

[1526] a VL sequence of a humanized M-H antibody listed in Table 13, or a sequence having at least about 85%, 90%, 95%, or 99% sequence identity to a VL of a humanized M-H antibody listed in Table 13.

[1527] In some embodiment, the anti-TCRβV antibody molecule comprises an antigen binding domain comprising:

[1528] (i) a HC CDR1, a HC CDR2 and a HC CDR3 of Antibody N listed in Table 13; or

[1529] (ii) a LC CDR1, a LC CDR2, and a LC CDR3 of Antibody N listed in Table 13.

[1530] In some embodiments, the anti-TCRβV antibody molecule comprises an antigen binding domain comprising a heavy chain variable region (VH) comprising one, two or all (e.g., three) of a HC CDR1, a HC CDR2 and a HC CDR3 of antibody N or humanized N-H antibody listed in Table 13.

[1531] In some embodiments, the anti-TCRβV antibody molecule comprises an antigen binding domain comprising a light chain variable region (VL) comprising one, two or all (e.g., three) of a LC CDR1, a LC CDR2 and a LC CDR3 of antibody N or humanized N-H antibody listed in Table 13.

[1532] In some embodiments, the anti-TCRβV antibody molecule comprises:

[1533] a VH sequence of a humanized N-H antibody listed in Table 13, or a sequence having at least about 85%, 90%, 95%, or 99% sequence identity to a VH of a humanized N-H antibody listed in Table 13; and/or

[1534] a VL sequence of a humanized N-H antibody listed in Table 13, or a sequence having at least about 85%, 90%, 95%, or 99% sequence identity to a VL of a humanized N-H antibody listed in Table 13.

[1535] In some embodiment, the anti-TCRβV antibody molecule comprises an antigen binding domain comprising:

[1536] (i) a HC CDR1, a HC CDR2 and a HC CDR3 of Antibody 0 listed in Table 13; or

[1537] (ii) a LC CDR1, a LC CDR2, and a LC CDR3 of Antibody 0 listed in Table 13.

[1538] In some embodiments, the anti-TCRβV antibody molecule comprises an antigen binding domain comprising a heavy chain variable region (VH) comprising one, two or all (e.g., three) of a HC CDR1, a HC CDR2 and a HC CDR3 of antibody 0 or humanized O—H antibody listed in Table 13.

[1539] In some embodiments, the anti-TCRβV antibody molecule comprises an antigen binding domain comprising a light chain variable region (VL) comprising one, two or all (e.g., three) of a LC CDR1, a LC CDR2 and a LC CDR3 of antibody 0 or humanized O—H antibody listed in Table 13.

[1540] In some embodiments, the anti-TCRβV antibody molecule comprises:

[1541] a VH sequence of a humanized O—H antibody listed in Table 13, or a sequence having at least about 85%, 90%, 95%, or 99% sequence identity to a VH of a humanized O—H antibody listed in Table 13; and/or

[1542] a VL sequence of a humanized O—H antibody listed in Table 13, or a sequence having at least about 85%, 90%, 95%, or 99% sequence identity to a VL of a humanized O—H antibody listed in Table 13.

[1543] In another aspect, the disclosure provides a non-murine, e.g., a human-like antibody molecule (e.g., a human or humanized antibody molecule), which binds, e.g., specifically binds, to a T cell receptor beta variable (TCRβV) region. In some embodiments, binding of the anti-TCRβV antibody molecule results in expansion, e.g., at least about 1.1-50 fold expansion (e.g., at least about 1.5-40 fold, 2-35 fold, 3-30 fold, 5-25 fold, 8-20 fold, or 10-15 fold expansion), of a population of T cells, e.g., a population of T cells having a memory-like phenotype, e.g., CD45RA+ CCR7− T cells. In some embodiments, the population of T cells having a memory-like phenotype comprises CD4+ and/or CD8+ T cells. In some embodiments, the population of T cells having a memory-like phenotype comprises a population of memory T cells, e.g., T effector memory (TEM) cells, e.g., TEM cells expressing CD45RA (TEMRA) cells, e.g., CD4+ or CD8+ TEMRA cells. In some embodiments, the population of T cells having a memory-like phenotype does not express a senescent marker, e.g., CD57. In some embodiments, the population of T cells having a memory-like phenotype does not express an inhibitory receptor, e.g., OX40, 4-1BB, and/or ICOS.

[1544] In some embodiments, the population of T cells having a memory-like phenotype is a population of T cells with CD45RA+ CCR7− CD57−. In some embodiments, the population of T cells having a memory-like phenotype does not express an inhibitory receptor, e.g., OX40, 4-1BB, and/or ICOS.

[1545] In some embodiments, the population of T cells having a memory-like phenotype, e.g., as described herein, has increased proliferative capacity, e.g., as compared to a reference cell population, e.g., an otherwise similar population of cells that has not been contacted with an anti-TCRβV antibody.

[1546] In some embodiments, the expansion is at least about 1.1-10 fold expansion (e.g., at least about 1.1, 1.2, 1.3, 1.4, 1.5, 2, 3, 4, 5, 6, 7, 8, 9, or 10 fold expansion).

[1547] In some embodiments, expansion of the population of T cells having a memory-like phenotype, e.g., memory effector T cells, e.g., TEM cells, e.g., TEMRA cells, e.g., CD4+ or CD8+ TEMRA cells, is compared to expansion of a similar population of cells with an antibody that binds to: a CD3 molecule, e.g., CD3 epsilon (CD3e) molecule; or a TCR alpha (TCRα) molecule.

[1548] In some embodiments, the population of expanded T cells having a memory-like phenotype, e.g., T effector memory cells, comprises cells T cells, e.g., CD3+, CD8+ or CD4+ T cells. In some embodiments, the population of expanded T cells having a memory-like phenotype, T effector memory cells, comprises CD3+ and CD8+ T cells. In some embodiments, the population of expanded T cells having a memory-like phenotype, e.g., T effector memory cells comprises CD3+ and CD4+ T cells.

[1549] In some embodiments, the population of expanded T cells having a memory-like phenotype, T effector memory (TEM) cells, comprises cells T cells, e.g., CD3+, CD8+ or CD4+ T cells, which express or re-express, CD45RA, e.g., CD45RA+. In some embodiments, the population comprises TEM cells expressing CD45RA, e.g., TEMRA cells. In some embodiments, expression of CD45RA on TEMRA cells, e.g., CD4+ or CD8+ TEMRA cells, can be detected by a method disclosed herein, e.g., flow cytometry.

[1550] In some embodiments, the population of T cells having a memory-like phenotype, e.g., TEMRA cells have low or no expression of CCR7, e.g., CCR7− or CCR7 low. In some embodiments, expression of CCR7 on TEMRA cells cannot be detected by a method disclosed herein, e.g., flow cytometry.

[1551] In some embodiments, the population of T cells having a memory-like phenotype, e.g., TEMRA cells express CD95, e.g., CD95+. In some embodiments, expression of CD95 on TEMRA cells can be detected by a method disclosed herein, e.g., flow cytometry.

[1552] In some embodiments, the population of T cells having a memory-like phenotype, e.g., TEMRA cells express CD45RA, e.g., CD45RA+, have low or no expression of CCR7, e.g., CCR7− or CCR7 low, and express CD95, e.g., CD95+. In some embodiments, the population of T cells having a memory-like phenotype, e.g., TEMRA cells can be identified as CD45RA+, CCR7− and CD95+ cells. In some embodiments, the population of T cells having a memory-like phenotype, e.g., TEMRA cells comprise CD3+, CD4+ or CD8+ T cells (e.g., CD3+ T cells, CD3+CD8+ T cells, or CD3+CD4+ T cells).

[1553] In some embodiments, the population of T cells having a memory-like phenotype does not express a senescent marker, e.g., CD57.

[1554] In some embodiments, the population of T cells having a memory-like phenotype does not express an inhibitory receptor, e.g., OX40, 4-1BB, and/or ICOS.

[1555] In some embodiments, binding of the anti-TCRβV antibody molecule results in expansion, e.g., at least about 1.1-50 fold expansion (e.g., at least about 1.5-40 fold, 2-35 fold, 3-30 fold, 5-25 fold, 8-20 fold, or 10-15 fold expansion), of a subpopulation of T cells. In some embodiments, the anti-TCRβV antibody molecule-activated (e.g., expanded) subpopulation of T cells resemble TEMRA cells in high expression of CD45RA and/or low expression of CCR7. In some embodiments, the anti-TCRβV antibody molecule-activated (e.g., expanded) subpopulation of T cells do not display upregulation of the senescence markers CD57 and/or KLRG1. In some embodiments, the anti-TCRβV antibody molecule-activated (e.g., expanded) subpopulation of T cells do not display upregulation of co-stimulatory molecules CD27 and/or CD28. In some embodiments, the anti-TCRβV antibody molecule-activated (e.g., expanded) subpopulation of T cells are highly proliferative. In some embodiments, the anti-TCRβV antibody molecule-activated (e.g., expanded) subpopulation of T cells secrete IL-2. In some embodiments, expression of surface markers on T cells can be detected by a method disclosed herein, e.g., flow cytometry. In some embodiments, the proliferative capability of T cells can be detected by a method disclosed herein, e.g., a method described in Example 4. In some embodiments, cytokine expression of T cells can be detected by a method disclosed herein, e.g., a method described in Examples 10 and 21. In some embodiments, the expansion is at least about 1.1-10 fold expansion (e.g., at least about 1.1, 1.2, 1.3, 1.4, 1.5, 2, 3, 4, 5, 6, 7, 8, 9, or 10 fold expansion). In some embodiments, the expansion is compared to expansion of a similar population of cells with an antibody that binds to a CD3 molecule, e.g., CD3 epsilon (CD3e) molecule; or a TCR alpha (TCRα) molecule.

[1556] In some embodiments, binding of the anti-TCRβV antibody molecule to a TCRβV region results in one, two, three, four, five, six, seven, eight, nine, ten or more (e.g., all) of the following:

[1557] (i) reduced level, e.g., expression level, and/or activity of IL-10;

[1558] (ii) reduced level, e.g., expression level, and/or activity of IL-6;

[1559] (iii) reduced level, e.g., expression level, and/or activity of TNFα;

[1560] (iv) increased level, e.g., expression level, and/or activity of IL-2;

[1561] (v) a delay, e.g., at least 1, 2, 3, 4, 5, 6, 7, 8, 9, 10 or more hours delay, in increased level, e.g., expression level, and/or activity of IL-2;

[1562] (vi) a delay, e.g., at least 1, 2, 3, 4, 5, 6, 7, 8, 9, 10 hours delay, in increased level, e.g., expression level, and/or activity of IFNg;

[1563] (vii) reduced T cell proliferation kinetics;

[1564] (viii) reduced cytokine storm, e.g., cytokine release syndrome (CRS) and/or neurotoxicity (NT), e.g., as measured by an assay of Example 3;

[1565] (ix) cell killing, e.g., target cell killing, e.g. cancer cell killing, e.g., as measured by an assay of Example 4;

[1566] (x) increased level, e.g., expression level, and/or activity of IL-15; or

[1567] (xi) increased Natural Killer (NK) cell proliferation, e.g., expansion, compared to an antibody that binds to: a CD3 molecule, e.g., CD3 epsilon (CD3e) molecule; or a TCR alpha (TCRα) molecule.

[1568] In some embodiments of any of the compositions disclosed herein, binding of the anti-TCRβV antibody molecule to a TCRβV region results in a reduction of at least 2, 5, 10, 20, 50, 100, or 200 fold, or at least 2-200 fold (e.g., 5-150, 10-100, 20-50 fold) in the expression level and or activity of IL-10 as measured by an assay of Example 3.

[1569] In some embodiments of any of the compositions disclosed herein, binding of the anti-TCRβV antibody molecule to a TCRβV region results in a reduction of at least 2, 5, 10, 20, 50, 100, 200, 300, 400, 500, 600, 700, 800, 900, or 1000 fold, or at least 2-1000 fold (e.g., 5-900, 10-800, 20-700, 50-600, 100-500, or 200-400 fold) in the expression level and or activity of IL-6 as measured by an assay of Example 3.

[1570] In some embodiments of any of the compositions disclosed herein, binding of the anti-TCRβV antibody molecule to a TCRβV region results in a reduction of at least 2, 5, 10, 20, 50, 100, 200, 300, 400, 500, 600, 700, 800, 900, 1000, or 2000 fold, or at least 2-2000 fold (e.g., 5-1000, 10-900, 20-800, 50-700, 100-600, 200-500, or 300-400 fold) in the expression level and or activity of TNFα as measured by an assay of Example 3.

[1571] In some embodiments of any of the compositions disclosed herein, binding of the anti-TCRβV antibody molecule to a TCRβV region results in an increase of at least 2, 5, 10, 20, 50, 100, 200, 300, 400, 500, 600, 700, 800, 900, 1000, or 2000 fold, or at least 2-2000 fold (e.g., 5-1000, 10-900, 20-800, 50-700, 100-600, 200-500, or 300-400 fold) in the expression level and or activity of IL-2 as measured by an assay of Example 3.

[1572] In some embodiments of any of the compositions disclosed herein, binding of the anti-TCRβV antibody molecule to a TCRβV region results in an increase of at least 2, 5, 10, 20, 50, 100, 200, 300, 400, 500, 600, 700, 800, 900, 1000, or 2000 fold, or at least 2-2000 fold (e.g., 5-1000, 10-900, 20-800, 50-700, 100-600, 200-500, or 300-400 fold) in the expression level and or activity of IL-15 as measured by an assay of Example 4.

[1573] In some embodiments of any of the compositions disclosed herein, binding of the anti-TCRβV antibody molecule results in proliferation, e.g., expansion, e.g., at least about 1.1-50 fold expansion (e.g., at least about 1.5-40 fold, 2-35 fold, 3-30 fold, 5-25 fold, 8-20 fold, or 10-15 fold expansion), of a population of Natural Killer (NK) cells. In some embodiments, the expansion of NK cells is at least about 1.1-30 fold expansion (e.g., at least about 1.1, 1.2, 1.3, 1.4, 1.5, 2, 3, 4, 5, 6, 7, 8, 9, 10, 15, 20, 25, or at least about 1.1-5, 5-10, 10-15, 15-20, 20-25, or 25-30 fold expansion). In some embodiments, the expansion of NK cells is measure by an assay of Example 4. In some embodiments, the expansion of NK cells by, e.g., binding of, the anti-TCRβV antibody molecule is compared to expansion of an otherwise similar population not contacted with the anti-TCRβV antibody molecule.

[1574] In some embodiments of any of the compositions disclosed herein, binding of the anti-TCRβV antibody molecule results in cell killing, e.g., target cell killing, e.g. cancer cell killing. In some embodiments, the cancer cell is a hematological cancer cell or a solid tumor cell. In some embodiments, the cancer cell is a multiple myeloma cell. In some embodiments, binding of the anti-TCRβV antibody molecule results in cell killing in vitro or in vivo. In some embodiments, cell killing is measured by an assay of Example 4.

[1575] In some embodiments of any of the compositions disclosed herein, binding of the anti-TCRβV antibody molecule to a TCRβV region results in an increase or decrease of at least 2, 5, 10, 20, 50, 100, 200, 300, 400, 500, 600, 700, 800, 900, 1000, or 2000 fold, or at least 2-2000 fold (e.g., 5-1000, 10-900, 20-800, 50-700, 100-600, 200-500, or 300-400 fold) of any of the activities described herein compared the activity of 16G8 or TM23 murine antibody, or a humanized version thereof as described in U.S. Pat. No. 5,861,155.

[1576] In an aspect, provided herein is an antibody molecule which binds, e.g., specifically binds, to a T cell receptor beta variable chain (TCRβV) region (an anti-TCRβV antibody molecule), wherein the anti-TCRβV antibody molecule:

[1577] (i) binds specifically to an epitope on TCRβV, e.g., the same or similar epitope as the epitope recognized by an anti-TCRβV antibody molecule as described herein, e.g., a second anti-TCRβV antibody molecule;

[1578] (ii) shows the same or similar binding affinity or specificity, or both, as an anti-TCRβV antibody molecule as described herein, e.g., a second anti-TCRβV antibody molecule;

[1579] (iii) inhibits, e.g., competitively inhibits, the binding of an anti-TCRβV antibody molecule as described herein, e.g., a second anti-TCRβV antibody molecule;

[1580] (iv) binds the same or an overlapping epitope with an anti-TCRβV antibody molecule as described herein, e.g., a second anti-TCRβV antibody molecule; or

[1581] (v) competes for binding, and/or binds the same epitope, with an anti-TCRβV antibody molecule as described herein, e.g., a second anti-TCRβV antibody molecule,

[1582] In some embodiments, the second anti-TCRβV antibody molecule comprises an antigen binding domain chosen from Table 1 or Table 2, or a sequence substantially identical thereto. In some embodiments, the second anti-TCRβV antibody molecule comprises an antigen binding domain, comprising:

[1583] a heavy chain complementarity determining region 1 (HC CDR1), a heavy chain complementarity determining region 2 (HC CDR2) and/or a heavy chain complementarity determining region 3 (HC CDR3) of SEQ ID NO: 1 or SEQ ID NO: 9; and/or a light chain complementarity determining region 1 (LC CDR1), a light chain complementarity determining region 2 (LC CDR2), and/or a light chain complementarity determining region 3 (LC CDR3) of SEQ ID NO: 2, SEQ ID NO: 10 or SEQ ID NO: 11.

[1584] In some embodiments of any of the compositions disclosed herein, binding of the anti-TCRβV antibody molecule to a TCRβV region results in a change in any (e.g., one, two, three, four or all) of (i)-(v) that is different, e.g., an increase or decrease, of at least 2, 5, 10, 20, 50, 100-fold, compared the activity of 16G8 or TM23 murine antibody or a humanized version thereof as described in U.S. Pat. No. 5,861,155.

[1585] In some embodiments of any of the compositions disclosed herein, the anti-TCRβV antibody molecule binds to a TCRBV family (e.g., gene family), e.g., a TCRBV gene family comprising subfamilies, e.g., as described herein. In some embodiments, the TCRBV family, e.g., gene family, comprises: a TCRβ V6 subfamily, a TCRβ V10 subfamily, a TCRβ V12 subfamily, a TCRβ V5 subfamily, a TCRβ V7 subfamily, a TCRβ V11 subfamily, a TCRβ V14 subfamily, a TCRβ V16 subfamily, a TCRβ V18 subfamily, a TCRβ V9 subfamily, a TCRβ V13 subfamily, a TCRβ V4 subfamily, a TCRβ V3 subfamily, a TCRβ V2 subfamily, a TCRβ V15 v, a TCRβ V30 subfamily, a TCRβ V19 subfamily, a TCRβ V27 subfamily, a TCRβ V28 subfamily, a TCRβ V24 subfamily, a TCRβ V20 subfamily, TCRβ V25 subfamily, a TCRβ V29 subfamily, a TCRβ V23 subfamily, a TCRβ V21 subfamily, a TCRβ V1 subfamily, a TCRβ V17 subfamily, or a TCRβ V26 subfamily.

[1586] In some embodiments, the anti-TCRβV antibody binds to a TCRβ V6 subfamily chosen from: TCRβ V6-4*01, TCRβ V6-4*02, TCRβ V6-9*01, TCRβ V6-8*01, TCRβ V6-5*01, TCRβ V6-6*02, TCRβ V6-6*01, TCRβ V6-2*01, TCRβ V6-3*01 or TCRβ V6-1*01. In some embodiments the TCRβ V6 subfamily comprises TCRβ V6-5*01.

[1587] In some embodiments, the anti-TCRβV antibody binds to a TCRβ V10 subfamily chosen from: TCRβ V10-1*01, TCRβ V10-1*02, TCRβ V10-3*01 or TCRβ V10-2*01.

[1588] In some embodiments, the anti-TCRβV antibody binds to a TCRβ V12 subfamily chosen from: TCRβ V12-4*01, TCRβ V12-3*01 or TCRβ V12-5*01.

[1589] In some embodiments of any of the compositions disclosed herein, the anti-TCRβV antibody molecule does not bind to TCRβ V12, or binds to TCRβ V12 with an affinity and/or binding specificity that is less than (e.g., less than about 10%, 20%, 30%, 40%, 50%, 60%, 70%, 80%, 90% or about 2-, 5-, or 10-fold) the affinity and/or binding specificity of the 16G8 murine antibody or a humanized version thereof as described in U.S. Pat. No. 5,861,155.

[1590] In some embodiments of any of the compositions disclosed herein, the anti-TCRβV antibody molecule binds to TCRβ V12 with an affinity and/or binding specificity that is greater than (e.g., greater than about 10%, 20%, 30%, 40%, 50%, 60%, 70%, 80%, 90% or about 2-, 5-, or 10-fold) the affinity and/or binding specificity of the 16G8 murine antibody or a humanized version thereof as described in U.S. Pat. No. 5,861,155.

[1591] In some embodiments of any of the compositions disclosed herein, the anti-TCRβV antibody molecule binds to a TCRβV region other than TCRβ V12 (e.g., TCRβV region as described herein, e.g., TCRβ V6 subfamily (e.g., TCRβ V6-5*01) with an affinity and/or binding specificity that is greater than (e.g., greater than about 10%, 20%, 30%, 40%, 50%, 60%, 70%, 80%, 90% or about 2-, 5-, or 10-fold) the affinity and/or binding specificity of the 16G8 murine antibody or a humanized version thereof as described in U.S. Pat. No. 5,861,155.

[1592] In some embodiments of any of the compositions disclosed herein, the anti-TCRβV antibody molecule does not comprise at least one CDR of Antibody B. In some embodiments of any of the compositions disclosed herein, the anti-TCRβV antibody molecule does not comprise the CDRs of Antibody B.

[1593] In some embodiments of any of the compositions disclosed herein, the anti-TCRβV antibody binds to a TCRβ V5 subfamily chosen from: TCRβ V5-5*01, TCRβ V5-6*01, TCRβ V5-4*01, TCRβ V5-8*01, TCRβ V5-1*01.

[1594] In some embodiments of any of the compositions disclosed herein, the anti-TCRβV antibody binds to a TCRβ V5 subfamily chosen from: TCRβ V5-5*01, TCRβ V5-6*01, TCRβ V5-4*01, TCRβ V5-8*01, TCRβ V5-1*01.

[1595] In some embodiments of any of the compositions disclosed herein, the anti-TCRβV antibody molecule does not bind to TCRβ V5-5*01 or TCRβ V5-1*01, or binds to TCRβ V5-5*01 or TCRβ V5-1*01 with an affinity and/or binding specificity that is less than (e.g., less than about 10%, 20%, 30%, 40%, 50%, 60%, 70%, 80%, 90% or about 2-, 5-, or 10-fold) the affinity and/or binding specificity of the TM23 murine antibody or a humanized version thereof as described in U.S. Pat. No. 5,861,155.

[1596] In some embodiments of any of the compositions disclosed herein, the anti-TCRβV antibody molecule binds to TCRβ V5-5*01 or TCRβ V5-1*01 with an affinity and/or binding specificity that is greater than (e.g., greater than about 10%, 20%, 30%, 40%, 50%, 60%, 70%, 80%, 90% or about 2-, 5-, or 10-fold) the affinity and/or binding specificity of the TM23 murine antibody or a humanized version thereof as described in U.S. Pat. No. 5,861,155.

[1597] In some embodiments of any of the compositions disclosed herein, the anti-TCRβV antibody molecule binds to a TCRβV region other than TCRβ V5-5*01 or TCRβ V5-1*01 (e.g., TCRβV region as described herein, e.g., TCRβ V6 subfamily (e.g., TCRβ V6-5*01) with an affinity and/or binding specificity that is greater than (e.g., greater than about 10%, 20%, 30%, 40%, 50%, 60%, 70%, 80%, 90% or about 2-, 5-, or 10-fold) the affinity and/or binding specificity of the TM23 murine antibody or a humanized version thereof as described in U.S. Pat. No. 5,861,155.

[1598] In some embodiments of any of the compositions disclosed herein, the anti-TCRβV antibody molecule does not comprise at least one CDR of the TM23 murine antibody. In some embodiments of any of the compositions disclosed herein, the anti-TCRβV antibody molecule does not comprise the CDRs of the TM23 murine antibody.

[1599] In some embodiments of any of the compositions disclosed herein, an anti-TCRβV antibody molecule disclosed herein does not comprise the sequence of a murine anti-rat TCR antibody R73, e.g., as disclosed in J Exp Med. 1989 Jan. 1; 169(1): 73-86, herein incorporated by reference in its entirety. In some embodiments of any of the compositions disclosed herein, a multispecific antibody molecule disclosed herein does not comprise the sequence of a murine anti-rat TCR antibody R73, e.g., as disclosed in J Immunol. 1993 Mar. 15; 150(6):2305-15, herein incorporated by reference in its entirety.

[1600] In some embodiments of any of the compositions disclosed herein, an anti-TCRβV antibody molecule disclosed herein does not comprise a viral peptide-WIC complex, e.g., as disclosed in Oncoimmunology. 2016; 5(1): e1052930, herein incorporated by reference in its entirety. In some embodiments of any of the compositions disclosed herein, a multispecific antibody molecule disclosed herein does not comprise a viral peptide-WIC complex, e.g., as disclosed in Oncoimmunology. 2016; 5(1): e1052930, herein incorporated by reference in its entirety.

[1601] In some embodiments of any of the compositions disclosed herein, the anti-TCRβV antibody molecule binds to one or more (e.g., all) of the following TCRβV subfamilies:

[1602] (i) TCRβ V6 subfamily comprising, e.g., one or more of TCRβ V6-4*01, TCRβ V6-4*02, TCRβ V6-9*01, TCRβ V6-8*01, TCRβ V6-5*01, TCRβ V6-6*02, TCRβ V6-6*01, TCRβ V6-2*01, TCRβ V6-3*01 or TCRβ V6-1*01;

[1603] (ii) TCRβ V10 subfamily comprising, e.g., one or more of TCRβ V10-1*01, TCRβ V10-1*02, TCRβ V10-3*01 or TCRβ V10-2*01;

[1604] (iii) TCRβ V5 subfamily comprising, e.g., one or more of TCRβ V5-6*01, TCRβ V5-4*01, or TCRβ V5-8*01;

[1605] (iv) TCRβ V12 subfamily comprising e.g., one or more of TCRβ V12-4*01, TCRβ V12-3*01, or TCRβ V12-5*01;

[1606] (v) TCRβ V7 subfamily comprising e.g., one or more of TCRβ V7-7*01, TCRβ V7-6*01, TCRβ V7-8*02, TCRβ V7-4*01, TCRβ V7-2*02, TCRβ V7-2*03, TCRβ V7-2*01, TCRβ V7-3*01, TCRβ V7-9*03, or TCRβ V7-9*01;

[1607] (vi) TCRβ V11 subfamily comprising e.g., one or more of TCRβ V11-1*01, TCRβ V11-2*01 or TCRβ V11-3*01;

[1608] (vii) TCRβ V14 subfamily comprising TCRβ V14*01;

[1609] (viii) TCRβ V16 subfamily comprising TCRβ V16*01;

[1610] (ix) TCRβ V18 subfamily comprising TCRβ V18*01;

[1611] (x) TCRβ V9 subfamily comprising T e.g., one or more of CRβ V9*01 or TCRβ V9*02;

[1612] (xi) TCRβ V13 subfamily comprising TCRβ V13*01;

[1613] (xii) TCRβ V4 subfamily comprising e.g., one or more of e.g., one or more of TCRβ V4-2*01, TCRβ V4-3*01, or TCRβ V4-1*01;

[1614] (xiii) TCRβ V3 subfamily comprising TCRβ V3-1*01;

[1615] (xiv) TCRβ V2 subfamily comprising TCRβ V2*01;

[1616] (xv) TCRβ V15 subfamily comprising TCRβ V15*01;

[1617] (xvi) TCRβ V30 subfamily comprising e.g., one or more of TCRβ V30*01, or TCRβ V30*02;

[1618] (xvii) TCRβ V19 subfamily comprising e.g., one or more of TCRβ V19*01, or TCRβ V19*02;

[1619] (xviii) TCRβ V27 subfamily comprising TCRβ V27*01;

[1620] (xix) TCRβ V28 subfamily comprising TCRβ V28*01;

[1621] (xx) TCRβ V24 subfamily comprising TCRβ V24-1*01;

[1622] (xxi) TCRβ V20 subfamily comprising e.g., one or more of TCRβ V20-1*01, or TCRβ V20-1*02;

[1623] (xxii) TCRβ V25 subfamily comprising TCRβ V25-1*01; or

[1624] (xxiii) TCRβ V29 subfamily comprising TCRβ V29-1*01;

[1625] (xxiv) TCRβ V21 subfamily;

[1626] (xxv) TCRβ V1 subfamily;

[1627] (xxvi) TCRβ V17 subfamily;

[1628] (xvii) TCRβ V23 subfamily; or

[1629] (xviii) TCRβ V26 subfamily.

[1630] In some embodiments of any of the compositions disclosed herein, the anti-TCRβV antibody molecule binds to one or more (e.g., all) of the following TCRβV subfamilies: (i) TCRβ V6, e.g., one or more of TCRβ V6-4*01, TCRβ V6-4*02, TCRβ V6-9*01, TCRβ V6-8*01, TCRβ V6-5*01, TCRβ V6-6*02, TCRβ V6-6*01, TCRβ V6-2*01, TCRβ V6-3*01 or TCRβ V6-1*01;

[1631] (ii) TCRβ V10, e.g., one or more of TCRβ V10-1*01, TCRβ V10-1*02, TCRβ V10-3*01 or TCRβ V10-2*01;

[1632] (iii) TCRβ V12, e.g., one or more of TCRβ V12-4*01, TCRβ V12-3*01, or TCRβ V12-5*01; or (iv) TCRβ V5, e.g., one or more of TCRβ V5-5*01, TCRβ V5-6*01, TCRβ V5-4*01, TCRβ V5-8*01, TCRβ V5-1*01.

[1633] In some embodiments, the anti-TCRβV antibody molecule binds to TCRβ V6, e.g., one or more of TCRβ V6-4*01, TCRβ V6-4*02, TCRβ V6-9*01, TCRβ V6-8*01, TCRβ V6-5*01, TCRβ V6-6*02, TCRβ V6-6*01, TCRβ V6-2*01, TCRβ V6-3*01 or TCRβ V6-1*01. In some embodiments, the anti-TCRβV antibody molecule binds to TCRβ V6-5*01.

[1634] In some embodiments, the anti-TCRβV antibody molecule does not bind to TCRβ V12.

[1635] In some embodiments, the anti-TCRβV antibody molecule does not bind to TCRβ V5-5*01 or TCRβ V5-1*01.

[1636] In an aspect, provided herein is a multispecific molecule (e.g., a bispecific molecule), comprising a first moiety (e.g., a first immune cell engager) comprising an antibody molecule which binds (e.g., specifically binds) to a T cell receptor beta variable region (TCRβV) (“anti-TCRβV antibody molecule”).

[1637] In some embodiments, the multispecific molecule comprises a second moiety which comprises one or more of: a tumor-targeting moiety, a cytokine molecule, a stromal modifying moiety, or an anti-TCRβV antibody molecule other than the first moiety.

[1638] In some embodiments, binding of the first moiety to the TCRβV region results in a cytokine profile, e.g., cytokine secretion profile, that differs from that of a T cell engager that binds to a receptor or molecule other than a TCRβV region (“a non-TCRβV-binding T cell engager”).

[1639] In another aspect, the disclosure provides a multispecific molecule, e.g., a bispecific molecule, comprising the anti-TCRβV antibody molecule disclosed herein.

[1640] In some embodiments, the multispecific molecule further comprises: a tumor-targeting moiety, a cytokine molecule, an immune cell engager, e.g., a second immune cell engager, and/or a stromal modifying moiety.

[1641] In yet another aspect, disclosed herein is a multispecific molecule, e.g., a bispecific molecule, comprising:

[1642] (i) a first moiety comprising a first immune cell engager comprising an anti-TCRβV antibody molecule disclosed herein; and

[1643] (ii) a second moiety comprising one or more of: a tumor-targeting moiety; a second immune cell engager; a cytokine molecule or a stromal modifying moiety.

[1644] In another aspect, the disclosure provides an isolated nucleic acid molecule comprising a nucleotide sequence encoding an anti-TCRβV antibody molecule disclosed herein, or a nucleotide sequence having at least 75%, 80%, 85%, 90%, 95%, or 99% identity thereto.

[1645] In another aspect, the disclosure provides an isolated nucleic acid molecule comprising a nucleotide sequence encoding a multispecific molecule disclosed herein, or a nucleotide sequence having at least 75%, 80%, 85%, 90%, 95%, or 99% identity thereto.

[1646] In yet another aspect, the disclosure provides a vector, e.g., an expression vector, comprising a nucleotide sequence encoding an anti-TCRβV antibody molecule disclosed herein, or a nucleotide sequence having at least 75%, 80%, 85%, 90%, 95%, or 99% identity thereto.

[1647] In another aspect, the disclosure provides a vector, e.g., an expression vector, comprising a nucleotide sequence encoding a multispecific molecule disclosed herein, or a nucleotide sequence having at least 75%, 80%, 85%, 90%, 95%, or 99% identity thereto.

[1648] In one aspect, the disclosure provides a cell, e.g., host cell, e.g., a population of cells, comprising a nucleic acid molecule encoding an anti-TCRβV antibody molecule disclosed herein, or a nucleotide sequence having at least 75%, 80%, 85%, 90%, 95%, or 99% identity thereto. In some embodiments, the cell or population of cells comprising a nucleic acid molecule encoding anti-TCRβV antibody molecule, comprises: (i) a heavy chain comprising: a variable region (VH), e.g., a VH listed in Tables 1-2 or 10-13, or a sequence having at least 75%, 80%, 85%, 90%, 95%, or 99% identity thereto; and one or more heavy chain constant regions, e.g., as described herein; and/or (ii) a light chain comprising: a variable region (VL) e.g., a VL listed in Tables 1-2 or 10-13, or a sequence having at least 75%, 80%, 85%, 90%, 95%, or 99% identity thereto; and a light chain constant region, e.g., as described herein, e.g., a kappa chain constant region comprising the sequence of SEQ ID NO: 39, or a sequence with at least 85%, 90%, 95%, or 99% sequence identity thereto. In some embodiments, the cell or population of cells further comprises an IgJ heavy chain constant region or a fragment thereof. In some embodiments, the IgJ heavy chain constant region comprises the sequence of SEQ ID NO: 76 or a sequence with at least 85%, 90%, 95%, or 99% sequence identity thereto. In some embodiments, the IgJ is comprised in, e.g., expressed in, the same cell or population of cells comprising, e.g., expressing, the anti-TCRβV antibody molecule, e.g., the heavy chain and/or the light chain of the anti-TCRβV antibody molecule. In some embodiments, the IgJ is expressed in a different cell or population of cells than the cell or population of cells comprising, e.g., expressing, the anti-TCRβV antibody molecule, e.g., the heavy chain and/or the light chain of the anti-TCRβV antibody molecule.

[1649] In one aspect, the disclosure provides a cell, e.g., host cell, e.g., a population of cells, comprising a nucleic acid molecule encoding a multispecific molecule disclosed herein, or a nucleotide sequence having at least 75%, 80%, 85%, 90%, 95%, or 99% identity thereto.

[1650] In one aspect, disclosed herein is an anti-TCRβV antibody molecule for use in the manufacture of a medicament for treating a disease, e.g., cancer, in a subject.

[1651] In one aspect, disclosed herein is a multispecific molecule comprising an anti-TCRβV antibody molecule for use in the manufacture of a medicament for treating a disease, e.g., cancer, in a subject.

[1652] In another aspect, the disclosure provides a method of making, e.g., producing, an anti-TCRβV antibody molecule, a multispecific molecule described herein, comprising culturing a host cell described herein, under suitable conditions. In some embodiments of a method of making a multispecific molecule, the conditions comprise, e.g., conditions suitable for gene expression and/or homo- or heterodimerization.

[1653] In another aspect, the disclosure provides a pharmaceutical composition comprising an anti-TCRβV antibody molecule, or a multispecific molecule described herein, and a pharmaceutically acceptable carrier, excipient, or stabilizer.

[1654] In an aspect, the disclosure provides a method of modulating, e.g., enhancing, an immune response in a subject comprising administering to the subject an effective amount of an antibody molecule which binds (e.g., specifically binds) to a T cell receptor beta variable region (TCRβV) (“anti-TCRβV antibody molecule”).

[1655] In an aspect, the disclosure provides a method of modulating, e.g., enhancing, an immune response in a subject comprising administering to the subject an effective amount of a multispecific molecule disclosed herein.

[1656] In some embodiments, the method comprises expanding, e.g., increasing the number of, an immune cell population in the subject.

[1657] In an aspect, the disclosure provides a method of expanding, e.g., increasing the number of, an immune cell population comprising, contacting the immune cell population with an effective amount of an antibody molecule which binds (e.g., specifically binds) to a T cell receptor beta variable region (TCRβV) (“anti-TCRβV antibody molecule”).

[1658] In an aspect, the disclosure provides a method of expanding, e.g., increasing the number of, an immune cell population comprising, contacting the immune cell population with an effective amount of a multispecific molecule disclosed herein.

[1659] In some embodiments, the expansion occurs in vivo or ex vivo (e.g., in vitro).

[1660] In some embodiments, the immune cell population comprises a TCRβV expressing cell, e.g., a TCRβV+ cell.

[1661] In some embodiments, the TCRβV expressing cell is a T cell, e.g., a CD8+ T cell, a CD3+ T cell or a CD4+ T cell.

[1662] In some embodiments, the immune cell population comprises a T cell (e.g., a CD4 T cell, or a CD8 T cell). In some embodiments, the immune cell population comprises a T cell having a memory-like phenotype, e.g., CD45RA+ CCR7−. In some embodiments, the immune cell population comprises an effector T cell or a memory T cell (e.g., a memory effector T cell (e.g., TEM cell, e.g., TEMRA cell), or a tumor infiltrating lymphocyte (TIL)).

[1663] In some embodiments, the immune cell population comprises a T cell, a Natural Killer cell, a B cell, or a myeloid cell.

[1664] In some embodiments, the immune cell population is obtained from a healthy subject.

[1665] In an aspect, provided herein is a method of treating a disease e.g., cancer, in a subject comprising administering to the subject an effective amount, e.g., a therapeutically effective amount, of an anti-TCRβV antibody molecule or a multispecific molecule comprising an anti-TCRβV antibody molecule disclosed herein, thereby treating the disease.

[1666] In a related aspect, provided herein is a composition comprising an anti-TCRβV antibody molecule or a multispecific molecule comprising an anti-TCRβV antibody molecule disclosed herein, for use in the treatment of a disease, e.g., cancer, in a subject.

[1667] In some embodiments, the disease is a cancer, e.g., a solid tumor or a hematological cancer, or a metastatic lesion.

[1668] In some embodiments, the method further comprises administering a second agent, e.g., therapeutic agent, e.g., as described herein. In some embodiments, second agent comprises a therapeutic agent (e.g., a chemotherapeutic agent, a biologic agent, hormonal therapy), radiation, or surgery. In some embodiments, therapeutic agent is selected from: a chemotherapeutic agent, or a biologic agent.

[1669] In another aspect, provided herein is a method of targeting, e.g., directing or re-directing, a therapy, e.g., treatment, to a T cell, e.g., in a subject, e.g., having a disease, e.g., cancer, comprising administering an effective amount of: (i) an anti-TCRβV antibody disclosed herein; and (ii) the therapy, e.g., a tumor targeting therapy (e.g., an antibody that binds to a cancer antigen), e.g., as described herein, thereby targeting the T cell.

[1670] In some embodiments, (i) and (ii) are conjugated, e.g., linked.

[1671] In some embodiments, (i) and (ii) are administered simultaneously or concurrently.

[1672] In some embodiments, the method results in: reduced cytokine release syndrome (CRS) (e.g., lesser duration of CRS or no CRS), or a reduced severity of CRS (e.g., absence of severe CRS, e.g., CRS grade 4 or 5) compared to administration of (ii) alone. In some embodiments, CRS is assessed by an assay of Example 3. In some embodiments, the method results in: reduced neurotoxicity (NT) (e.g., lesser duration of NT or no NT), or a reduced severity of NT (e.g., absence of severe NT) compared to administration of (ii) alone.

[1673] In yet another aspect, the disclosure provides, a method of targeting a T cell, e.g., in a subject having a disease, e.g., cancer, with an anti-TCRβV antibody disclosed herein or a multispecific molecule comprising an anti-TCRβV antibody disclosed herein.

[1674] In another aspect, the disclosure provides a method of treating, e.g., preventing or reducing, cytokine release syndrome (CRS) and/or neurotoxicity (NT) in a subject, e.g., CRS and/or NT associated with a treatment, e.g., a previously administered treatment, comprising administering to the subject an effective amount of an anti-TCRβV antibody disclosed herein or a multispecific molecule comprising an anti-TCRβV antibody disclosed herein, wherein, the subject has a disease, e.g., a cancer, thereby treating, e.g., preventing or reducing, CRS and/or NT in the subject.

[1675] In a related aspect, the disclosure provides a composition comprising an anti-TCRβV antibody disclosed herein or a multispecific molecule comprising an anti-TCRβV antibody disclosed herein, for use in the treatment, e.g., prevention or reduction, of cytokine release syndrome (CRS) and/or neurotoxicity (NT) in a subject, e.g., CRS and/or NT associated with a treatment, e.g., a previously administered treatment, comprising administering to the subject an effective amount of the anti-TCRβV antibody, wherein the subject has a disease, e.g., a cancer.

[1676] In some embodiments of a method or composition for use disclosed herein, the anti-TCRβV antibody is administered concurrently with or after the administration of the treatment associated with CRS and/or NT.

[1677] In another aspect, provided herein is a method of expanding, e.g., increasing the number of, an immune cell population comprising, contacting the immune cell population with an antibody molecule, e.g., humanized antibody molecule, which binds, e.g., specifically binds, to a T cell receptor beta variable chain (TCRβV) region (e.g., anti-TCRβV antibody molecule described herein or a multispecific molecule comprising an anti-TCRβV antibody molecule described herein), thereby expanding the immune cell population.

[1678] In some embodiments, the expansion occurs in vivo or ex vivo (e.g., in vitro).

[1679] In an aspect, provided herein is a method of evaluating a subject having a cancer, comprising acquiring a value of the status of a TCRβV molecule for the subject, wherein said value comprises a measure of the presence of, e.g., level or activity of, a TCRβV molecule in a sample from the subject, wherein the value of the status of a TCRβV molecule is higher, e.g., increased, in a sample from the subject compared to a reference value, e.g., a value from a healthy subject, e.g., a subject that does not have cancer.

[1680] In another aspect, the disclosure provides a method of treating a subject having a cancer, the method comprising (i) acquiring a value of the status of a TCRβV molecule for the subject, wherein said value comprises a measure of the presence of, e.g., level or activity of, a TCRβV molecule in a sample from the subject, and (ii) responsive to said value, administering an effective amount of an anti-TCRβV antibody molecule described herein (e.g., a TCRβV agonist) to the subject, thereby treating the cancer.

[1681] In some embodiments, the value is higher, e.g., increased, in a sample from the subject compared to a reference value, e.g., a value from a healthy subject, e.g., a subject that does not have cancer.

[1682] In a related aspect, the disclosure provides a composition comprising an anti-TCRβV antibody molecule for use in the treatment of a subject having a cancer, comprising (i) acquiring a value of the status of a TCRβV molecule for the subject, wherein said value comprises a measure of the presence of, e.g., level or activity of, a TCRβV molecule in a sample from the subject, and (ii) responsive to said value, administering an effective amount of an anti-TCRβV antibody molecule described herein (e.g., a TCRβV agonist) to the subject.

[1683] In an aspect, provided herein is method of evaluating a subject for the presence of a cancer, the method comprising:

[1684] (i) acquiring a value of the status of one or more TCRβV molecules for the subject, e.g., in a biological sample from the subject, wherein said value comprises a measure of the presence of, e.g., level or activity of, a TCRβV molecule in a sample from the subject, and

[1685] (ii) determining whether the value for the one or more TCRβV molecules is higher, e.g., increased, in a sample from the subject compared to a reference value, e.g., a value from a healthy subject, e.g., a subject that does not have cancer, wherein a value that is higher, e.g., increased, in the subject relative to the reference, e.g., healthy subject, is indicative of the presence of cancer in the subject.

[1686] In another aspect, the disclosure provides, a method of treating a subject having cancer, the method comprising:

[1687] (i) acquiring a value of the status of one or more TCRβV molecules for the subject, e.g., in a biological sample from the subject, wherein said value comprises a measure of the presence of, e.g., level or activity of, a TCRβV molecule in a sample from the subject;

[1688] (ii) determining whether the value for the one or more TCRβV molecules is higher, e.g., increased, in a sample from the subject compared to a reference value, e.g., a value from a healthy subject, e.g., a subject that does not have cancer, and

[1689] (iii) if a value that is higher, e.g., increased, in the subject relative to the reference value is determined, administering an effective amount of an anti-TCRβV antibody molecule, e.g., as described herein (e.g., a TCRβV agonist), to the subject, thereby treating the cancer.

[1690] In a related aspect, provided herein is a composition comprising anti-TCRβV antibody molecule for use in a method of treating a subject having a cancer, comprising

[1691] (i) acquiring a value of the status of one or more TCRβV molecules for the subject, e.g., in a biological sample from the subject, wherein said value comprises a measure of the presence of, e.g., level or activity of, a TCRβV molecule in a sample from the subject;

[1692] (ii) determining whether the value for the one or more TCRβV molecules is higher, e.g., increased, in a sample from the subject compared to a reference value, e.g., a value from a healthy subject, e.g., a subject that does not have cancer, and

[1693] (iii) if a value that is higher, e.g., increased, in the subject relative to the reference value is determined, administering an effective amount of an anti-TCRβV antibody molecule, e.g., as described herein (e.g., a TCRβV agonist), to the subject.

[1694] In some embodiments of any of the methods of treatment, or composition for use disclosed herein, the status is indicative of the subject having cancer, or a symptom thereof.

[1695] In some embodiments of any of the methods of treatment or composition for use disclosed herein, the status is indicative of responsiveness to a therapy, e.g., a therapy comprising an anti-TCRβV antibody molecule, e.g., as described herein.

[1696] In some embodiments of any of the methods of treatment or composition for use disclosed herein, the value of the status is determined, e.g., measured, by an assay described herein.

[1697] In yet another aspect, provided herein is a method of treating a subject having a cancer, comprising administering to the subject an effective amount of an anti-TCRBV antibody molecule described herein, wherein the subject has a higher, e.g., increased, level or activity of one or more TCRBV molecules, e.g., as described herein, compared to a reference level or activity of one or more TCRBV molecules, e.g., in a healthy subject, e.g., a subject not having a cancer

[1698] In an aspect, the disclosure provides, method of treating a subject having a cancer, comprising

[1699] (i) isolating a biological sample from the subject; e.g., a peripheral blood sample, biopsy sample, or bone marrow sample; and

[1700] (ii) acquiring a value of the status of one or more TCRβV molecules for the subject, e.g., in the biological sample from the subject, wherein said value comprises a measure of the presence of, e.g., level or activity of, a TCRβV molecule in a sample from the subject compared to a reference value, e.g., a sample from a health subject, wherein a value that is higher, e.g., increased, in the subject relative to the reference, e.g., healthy subject, is indicative of the presence of cancer in the subject,

[1701] (iii) contacting the biological sample with an anti-TCRβV antibody molecule, e.g., in vitro; and

[1702] (iv) administering the biological sample or a portion thereof from step (iii) to the subject.

[1703] In another aspect, provided herein is method of expanding a population of immune effector cells from a subject having a cancer, the method comprising:

[1704] (i) isolating a biological sample comprising a population of immune effector cells from the subject; e.g., a peripheral blood sample, biopsy sample, or bone marrow sample;

[1705] (ii) acquiring a value of the status of one or more TCRβV molecules for the subject, e.g., in the biological sample from the subject, wherein said value comprises a measure of the presence of, e.g., level or activity of, a TCRβV molecule in a sample from the subject compared to a reference value, e.g., a sample from a health subject, wherein a value that is higher, e.g., increased, in the subject relative to the reference, e.g., healthy subject, is indicative of the presence of cancer in the subject, and

[1706] (iii) contacting the biological sample comprising a population of immune effector cells with an anti-TCRβV antibody molecule.

[1707] In some embodiments, the method further comprises administering the population of immune effector cells contacted with the anti-TCRβV antibody molecule to the subject.

[1708] In some embodiments, a method of expansion, or method of treatment, or composition for use disclosed herein comprises measuring T cell function (e.g., cytotoxic activity, cytokine secretion, or degranulation) in the population of immune effector cells, e.g., compared to a reference population, e.g., an otherwise similar population not contacted with the anti-TCRβV antibody molecule or a population of immune effector cells obtained from a healthy subject (e.g., a subject that does not have a cancer).

[1709] In some embodiments of any of the methods or composition for use disclosed herein, the biological sample comprising the population of immune effector cells is contacted with an anti-TCRβV antibody molecule that binds to the one or more TCRβV molecules (e.g., the same TCRβV molecule) identified as being higher, e.g., increased, in the biological sample.

[1710] In some embodiments of any of the methods or composition for use disclosed herein, the biological sample comprising the population of immune effector cells is contacted with an anti-TCRβV antibody molecule that does not bind to the one or more TCRβV molecules (e.g., a different TCRβV molecule) identified as being higher, e.g., increased, in the biological sample.

[1711] In another aspect, provided herein is a method of identifying one or more TCRβV molecules associated with a cancer, the method comprising:

[1712] (i) acquiring a status for a plurality of TCRβV molecules in a biological sample from a first subject having the disease and in a biological sample from a second subject not having the disease; and

[1713] (ii) determining whether the level or activity of one or more of the TCRβV molecules is higher, e.g., increased, in the first subject relative to the second subject;

[1714] thereby identifying one or more TCRβV molecules associated with the cancer.

[1715] In some embodiments of any of the methods or composition for use disclosed herein, the one or more of the TCRβV molecules comprises one or more, (e.g., all) of the following TCRβV subfamilies:

[1716] (i) TCRβ V6 subfamily comprising, e.g., one or more of TCRβ V6-4*01, TCRβ V6-4*02, TCRβ V6-9*01, TCRβ V6-8*01, TCRβ V6-5*01, TCRβ V6-6*02, TCRβ V6-6*01, TCRβ V6-2*01, TCRβ V6-3*01 or TCRβ V6-1*01;

[1717] (ii) TCRβ V10 subfamily comprising, e.g., one or more of TCRβ V10-1*01, TCRβ V10-1*02, TCRβ V10-3*01 or TCRβ V10-2*01;

[1718] (iii) TCRβ V5 subfamily comprising, e.g., one or more of TCRβ V5-6*01, TCRβ V5-4*01, or TCRβ V5-8*01;

[1719] (iv) TCRβ V12 subfamily comprising e.g., one or more of TCRβ V12-4*01, TCRβ V12-3*01, or TCRβ V12-5*01;

[1720] (v) TCRβ V7 subfamily comprising e.g., one or more of TCRβ V7-7*01, TCRβ V7-6*01, TCRβ V7-8*02, TCRβ V7-4*01, TCRβ V7-2*02, TCRβ V7-2*03, TCRβ V7-2*01, TCRβ V7-3*01, TCRβ V7-9*03, or TCRβ V7-9*01;

[1721] (vi) TCRβ V11 subfamily comprising e.g., one or more of TCRβ V11-1*01, TCRβ V11-2*01 or TCRβ V11-3*01;

[1722] (vii) TCRβ V14 subfamily comprising TCRβ V14*01;

[1723] (viii) TCRβ V16 subfamily comprising TCRβ V16*01;

[1724] (ix) TCRβ V18 subfamily comprising TCRβ V18*01;

[1725] (x) TCRβ V9 subfamily comprising T e.g., one or more of CRβ V9*01 or TCRβ V9*02;

[1726] (xi) TCRβ V13 subfamily comprising TCRβ V13*01;

[1727] (xii) TCRβ V4 subfamily comprising e.g., one or more of e.g., one or more of TCRβ V4-2*01, TCRβ V4-3*01, or TCRβ V4-1*01;

[1728] (xiii) TCRβ V3 subfamily comprising TCRβ V3-1*01;

[1729] (xiv) TCRβ V2 subfamily comprising TCRβ V2*01;

[1730] (xv) TCRβ V15 subfamily comprising TCRβ V15*01;

[1731] (xvi) TCRβ V30 subfamily comprising e.g., one or more of TCRβ V30*01, or TCRβ V30*02;

[1732] (xvii) TCRβ V19 subfamily comprising e.g., one or more of TCRβ V19*01, or TCRβ V19*02;

[1733] (xviii) TCRβ V27 subfamily comprising TCRβ V27*01;

[1734] (xix) TCRβ V28 subfamily comprising TCRβ V28*01;

[1735] (xx) TCRβ V24 subfamily comprising TCRβ V24-1*01;

[1736] (xxi) TCRβ V20 subfamily comprising e.g., one or more of TCRβ V20-1*01, or TCRβ V20-1*02;

[1737] (xxii) TCRβ V25 subfamily comprising TCRβ V25-1*01; or

[1738] (xxiii) TCRβ V29 subfamily comprising TCRβ V29-1*01;

[1739] (xxiv) TCRβ V21 subfamily;

[1740] (xxv) TCRβ V1 subfamily;

[1741] (xxvi) TCRβ V17 subfamily;

[1742] (xvii) TCRβ V23 subfamily; or

[1743] (xviii) TCRβ V26 subfamily.

[1744] In some embodiments of any of the methods or composition for use disclosed herein, the cancer is a solid tumor including but not limited to: melanoma, pancreatic (e.g., pancreatic adenocarcinoma) cancer, breast cancer, colorectal cancer (CRC), lung cancer (e.g., small or non-small cell lung cancer), skin cancer, ovarian cancer, or liver cancer.

[1745] In some embodiments of any of the methods or composition for use disclosed herein, the cancer is a hematological cancer including, but not limited to: a B-cell or T cell malignancy, e.g., Hodgkin's lymphoma, Non-Hodgkin's lymphoma (e.g., B cell lymphoma, diffuse large B cell lymphoma (DLBCL), follicular lymphoma, chronic lymphocytic leukemia (B-CLL), mantle cell lymphoma, marginal zone B-cell lymphoma, Burkitt lymphoma, lymphoplasmacytic lymphoma, hairy cell leukemia), acute myeloid leukemia (AML), chronic myeloid leukemia, myelodysplastic syndrome, multiple myeloma, and acute lymphocytic leukemia.

[1746] In some embodiments of a method of expansion, or method of treatment, or composition for use disclosed herein, a higher, e.g., increased, level or activity of one or more TCRβV molecules in a subject, e.g., in a sample from a subject, is indicative of a bias, e.g., a preferential expansion, e.g., clonal expansion, of T cells expressing said one or more TCRβV molecules in the subject.

[1747] In some embodiments, a subject having a cancer, e.g., as disclosed herein, has a higher, e.g., increased, level or activity of one or more TCRβV molecules associated with the cancer. In some embodiments, the TCRβV molecule is associated with, e.g., recognizes, a cancer antigen, e.g., a cancer associated antigen or a neoantigen.

[1748] In some embodiments of any of the methods or composition for use disclosed herein, the subject has B-CLL. In some embodiments, a subject having B-CLL has a higher, e.g., increased, level or activity of one or more TCRβV molecules, e.g., one or more TCRβV molecules comprising: (i) TCRβ V6 subfamily comprising, e.g., TCRβ V6-4*01, TCRβ V6-4*02, TCRβ V6-9*01, TCRβ V6-8*01, TCRβ V6-5*01, TCRβ V6-6*02, TCRβ V6-6*01, TCRβ V6-2*01, TCRβ V6-3*01 or TCRβ V6-1*01; (ii) TCRβ V5 subfamily comprising TCRβ V5-6*01, TCRβ V5-4*01, or TCRβ V5-8*01; (iii) TCRβ V3 subfamily comprising TCRβ V3-1*01; (iv) TCRβ V2 subfamily comprising TCRβ V2*01; or (v) TCRβ V19 subfamily comprising TCRβ V19*01, or TCRβ V19*02.

[1749] In some embodiments, a subject having B-CLL has a higher, e.g., increased, level or activity of a TCRβ V6 subfamily comprising, e.g., TCRβ V6-4*01, TCRβ V6-4*02, TCRβ V6-9*01, TCRβ V6-8*01, TCRβ V6-5*01, TCRβ V6-6*02, TCRβ V6-6*01, TCRβ V6-2*01, TCRβ V6-3*01 or TCRβ V6-1*01. In some embodiments, the subject is administered an anti-TCRβV molecule (e.g., an agonistic anti-TCRβV molecule as described herein) that binds to one or more members of the TCRβ V6 subfamily. In some embodiments, administration of the an anti-TCRβV molecule results in expansion of immune cells expressing one or more members of the TCRβ V6 subfamily.

[1750] In some embodiments, a subject having B-CLL has a higher, e.g., increased, level or activity of a TCRβ V5 subfamily comprising TCRβ V5-6*01, TCRβ V5-4*01, or TCRβ V5-8*01. In some embodiments, the subject is administered an anti-TCRβV molecule (e.g., an agonistic anti-TCRβV molecule as described herein) that binds to one or more members of the TCRβ V5 subfamily. In some embodiments, administration of the an anti-TCRβV molecule results in expansion of immune cells expressing one or more members of the TCRβ V5 subfamily.

[1751] In some embodiments, a subject having B-CLL has a higher, e.g., increased, level or activity of a TCRβ V3 subfamily comprising TCRβ V3-1*01. In some embodiments, the subject is administered an anti-TCRβV molecule (e.g., an agonistic anti-TCRβV molecule as described herein) that binds to one or more members of the TCRβ V3 subfamily. In some embodiments, administration of an anti-TCRβV molecule results in expansion of immune cells expressing one or more members of the TCRβ V3 subfamily.

[1752] In some embodiments, a subject having B-CLL has a higher, e.g., increased, level or activity of a TCRβ V2 subfamily comprising TCRβ V2*01. In some embodiments, the subject is administered an anti-TCRβV molecule (e.g., an agonistic anti-TCRβV molecule as described herein) that binds to one or more members of the TCRβ V2 subfamily. In some embodiments, administration of an anti-TCRβV molecule results in expansion of immune cells expressing one or more members of the TCRβ V2 subfamily.

[1753] In some embodiments, a subject having B-CLL has a higher, e.g., increased, level or activity of a TCRβ V19 subfamily comprising TCRβ V19*01, or TCRβ V19*02. In some embodiments, the subject is administered an anti-TCRβV molecule (e.g., an agonistic anti-TCRBV molecule as described herein) that binds to one or more members of the TCRβ V19 subfamily. In some embodiments, administration of an anti-TCRβV molecule results in expansion of immune cells expressing one or more members of the TCRβ V19 subfamily.

[1754] In some embodiments of any of the methods or composition for use disclosed herein, the subject has melanoma. In some embodiments, a subject having melanoma has a higher, e.g., increased, level or activity of one or more TCRβV molecules, e.g., one or more TCRβV molecules comprising the TCRβ V6 subfamily comprising, e.g., TCRβ V6-4*01, TCRβ V6-4*02, TCRβ V6-9*01, TCRβ V6-8*01, TCRβ V6-5*01, TCRβ V6-6*02, TCRβ V6-6*01, TCRβ V6-2*01, TCRβ V6-3*01 or TCRβ V6-1*01. In some embodiments, the subject is administered an anti-TCRβV molecule (e.g., an agonistic anti-TCRβV molecule as described herein) that binds to one or more members of the TCRβ V6 subfamily. In some embodiments, administration of an anti-TCRβV molecule results in expansion of immune cells expressing one or more members of the TCRβ V6 subfamily.

[1755] In some embodiments of any of the methods or composition for use disclosed herein, the subject has DLBCL. In some embodiments, a subject having melanoma has a higher, e.g., increased, level or activity of one or more TCRβV molecules, e.g., one or more TCRβV molecules comprising: (i) TCRβ V13 subfamily comprising TCRβ V13*01; (ii) TCRβ V3 subfamily comprising TCRβ V3-1*01; or (iii) TCRβ V23 subfamily.

[1756] In some embodiments, a subject having DLBCL has a higher, e.g., increased, level or activity of a TCRβ V13 subfamily comprising TCRβ V13*01. In some embodiments, the subject is administered an anti-TCRβV molecule (e.g., an agonistic anti-TCRβV molecule as described herein) that binds to one or more members of the TCRβ V13 subfamily. In some embodiments, administration of an anti-TCRβV molecule results in expansion of immune cells expressing one or more members of the TCRβ V13 subfamily.

[1757] In some embodiments, a subject having DLBCL has a higher, e.g., increased, level or activity of a TCRβ V3 subfamily comprising TCRβ V3-1*01. In some embodiments, the subject is administered an anti-TCRβV molecule (e.g., an agonistic anti-TCRβV molecule as described herein) that binds to one or more members of the TCRβ V3 subfamily. In some embodiments, administration of an anti-TCRβV molecule results in expansion of immune cells expressing one or more members of the TCRβ V3 subfamily.

[1758] In some embodiments, a subject having DLBCL has a higher, e.g., increased, level or activity of a TCRβ V23 subfamily. In some embodiments, the subject is administered an anti-TCRβV molecule (e.g., an agonistic anti-TCRβV molecule as described herein) that binds to one or more members of the TCRβ V23 subfamily. In some embodiments, administration of an anti-TCRβV molecule results in expansion of immune cells expressing one or more members of the TCRβ V23 subfamily.

[1759] In some embodiments of any of the methods or composition for use disclosed herein, the subject has CRC. In some embodiments, a subject having melanoma has a higher, e.g., increased, level or activity of one or more TCRβV molecules, e.g., one or more TCRβV molecules comprising: (i) TCRβ V19 subfamily comprising TCRβ V19*01, or TCRβ V19*02; (ii) TCRβ V12 subfamily comprising TCRβ V12-4*01, TCRβ V12-3*01, or TCRβ V12-5*01; (iii) TCRβ V16 subfamily comprising TCRβ V16*01; or (iv) TCRβ V21 subfamily.

[1760] In some embodiments, a subject having CRC has a higher, e.g., increased, level or activity of a TCRβ V19 subfamily comprising TCRβ V19*01, or TCRβ V19*02. In some embodiments, the subject is administered an anti-TCRβV molecule (e.g., an agonistic anti-TCRβV molecule as described herein) that binds to one or more members of the TCRβ V19 subfamily. In some embodiments, administration of an anti-TCRβV molecule results in expansion of immune cells expressing one or more members of the TCRβ V19 subfamily.

[1761] In some embodiments, a subject having CRC has a higher, e.g., increased, level or activity of a TCRβ V12 subfamily comprising TCRβ V12-4*01, TCRβ V12-3*01, or TCRβ V12-5*01. In some embodiments, the subject is administered an anti-TCRβV molecule (e.g., an agonistic anti-TCRβV molecule as described herein) that binds to one or more members of the TCRβ V12 subfamily. In some embodiments, administration of an anti-TCRβV molecule results in expansion of immune cells expressing one or more members of the TCRβ V12 subfamily.

[1762] In some embodiments, a subject having CRC has a higher, e.g., increased, level or activity of a TCRβ V16 subfamily comprising TCRβ V16*01. In some embodiments, the subject is administered an anti-TCRβV molecule (e.g., an agonistic anti-TCRβV molecule as described herein) that binds to one or more members of the TCRβ V16 subfamily. In some embodiments, administration of an anti-TCRβV molecule results in expansion of immune cells expressing one or more members of the TCRβ V16 subfamily.

[1763] In some embodiments, a subject having CRC has a higher, e.g., increased, level or activity of a TCRβ V21 subfamily. In some embodiments, the subject is administered an anti-TCRβV molecule (e.g., an agonistic anti-TCRβV molecule as described herein) that binds to one or more members of the TCRβ V21 subfamily. In some embodiments, administration of an anti-TCRβV molecule results in expansion of immune cells expressing one or more members of the TCRβ V21 subfamily.

[1764] Alternatively or in combination with any of the embodiments disclosed herein, provided herein is an anti-TCRβV antibody molecule which:

[1765] (i) binds specifically to an epitope on TCRβV, e.g., the same or similar epitope as the epitope recognized by an anti-TCRβV antibody molecule as described herein, e.g., a second anti-TCRβV antibody molecule;

[1766] (ii) shows the same or similar binding affinity or specificity, or both, as an anti-TCRβV antibody molecule as described herein, e.g., a second anti-TCRβV antibody molecule;

[1767] (iii) inhibits, e.g., competitively inhibits, the binding of an anti-TCRβV antibody molecule as described herein, e.g., a second anti-TCRβV antibody molecule;

[1768] (iv) binds the same or an overlapping epitope with an anti-TCRβV antibody molecule as described herein, e.g., a second anti-TCRβV antibody molecule; or

[1769] (v) competes for binding, and/or binds the same epitope, with an anti-TCRβV antibody molecule as described herein, e.g., a second anti-TCRβV antibody molecule,

[1770] In some embodiments, the second anti-TCRβV antibody molecule comprises an antigen binding domain chosen from Table 1 or Table 2, or a sequence substantially identical thereto. In some embodiments, the second anti-TCRβV antibody molecule comprises an antigen binding domain, comprising:

[1771] a heavy chain complementarity determining region 1 (HC CDR1), a heavy chain complementarity determining region 2 (HC CDR2) and/or a heavy chain complementarity determining region 3 (HC CDR3) of SEQ ID NO: 1 or SEQ ID NO: 9; and/or a light chain complementarity determining region 1 (LC CDR1), a light chain complementarity determining region 2 (LC CDR2), and/or a light chain complementarity determining region 3 (LC CDR3) of SEQ ID NO: 2, SEQ ID NO: 10 or SEQ ID NO: 11.

[1772] In some embodiments of any of the compositions or methods disclosed herein, the anti-TCRβV antibody molecule comprises an antigen binding domain comprising:

[1773] (i) a heavy chain complementarity determining region 1 (HC CDR1), a heavy chain complementarity determining region 2 (HC CDR2) and/or a heavy chain complementarity determining region 3 (HC CDR3) of SEQ ID NO: 1 or SEQ ID NO: 9, or a sequence disclosed in Table 1; or

[1774] (ii) a light chain complementarity determining region 1 (LC CDR1), a light chain complementarity determining region 2 (LC CDR2), and/or a light chain complementarity determining region 3 (LC CDR3) of SEQ ID NO: 2, SEQ ID NO: 10 or SEQ ID NO: 11, or a sequence disclosed in Table 1.

[1775] In some embodiments of any of the compositions or methods disclosed herein, the anti-TCRβV antibody molecule comprises an antigen binding domain comprising a light chain variable region (VL) comprising one, two or all (e.g., three) of a LC CDR1, a LC CDR2 and a LC CDR3 of SEQ ID NO: 2, SEQ ID NO: 10 or SEQ ID NO: 11.

[1776] In some embodiments of any of the compositions or methods disclosed herein, the anti-TCRβV antibody molecule comprises an antigen binding domain comprising a heavy chain variable region (VH) comprising one, two or all (e.g., three) of a HC CDR1, a HC CDR2 and a HC CDR3 of SEQ ID NO:1 or SEQ ID NO: 9.

[1777] In some embodiments of any of the compositions or methods disclosed herein, the anti-TCRβV antibody molecule comprises an antigen binding domain comprising:

[1778] (i) a VL comprising: a LC CDR1 amino acid sequence of SEQ ID NO: 6 (or an amino acid sequence with not more than 1, 2, 3 or 4 modifications, e.g., substitutions, additions or deletions thereof), a LC CDR2 amino acid sequence of SEQ ID NO:7 (or an amino acid sequence with not more than 1, 2, 3 or 4 modifications, e.g., substitutions, additions or deletions thereof), and/or a LC CDR3 amino acid sequence of SEQ ID NO:8 (or an amino acid sequence with not more than 1, 2, 3 or 4 modifications, e.g., substitutions, additions or deletions thereof); and/or

[1779] (ii) a VH comprising: a HC CDR1 amino acid sequence of SEQ ID NO: 3 (or an amino acid sequence with not more than 1, 2, 3 or 4 modifications, e.g., substitutions, additions or deletions thereof), a HC CDR2 amino acid sequence of SEQ ID NO:4 (or an amino acid sequence with not more than 1, 2, 3 or 4 modifications, e.g., substitutions, additions or deletions thereof), and/or a HC CDR3 amino acid sequence of SEQ ID NO:5 (or an amino acid sequence with not more than 1, 2, 3 or 4 modifications, e.g., substitutions, additions or deletions thereof).

[1780] In some embodiments of any of the compositions or methods disclosed herein, the anti-TCRβV antibody molecule comprises an antigen binding domain comprising:

[1781] a variable heavy chain (VH) of SEQ ID NO: 9 or SEQ ID NO: 1312, or a sequence having at least about 75%, 80%, 85%, 90%, 95%, or 99% sequence identity thereto; and/or

[1782] a variable light chain (VL) of SEQ ID NO: 10 or SEQ ID NO: 11 or SEQ ID NO: 1314, or a sequence having at least about 75%, 80%, 85%, 90%, 95%, or 99% sequence identity thereto.

[1783] In some embodiments of any of the compositions or methods disclosed herein, the anti-TCRβV antibody molecule comprises an antigen binding domain comprising the VH amino acid sequence of SEQ ID NO: 9 and the VL amino acid sequence of SEQ ID NO: 10.

[1784] In some embodiments of any of the compositions or methods disclosed herein, the anti-TCRβV antibody molecule comprises an antigen binding domain comprising the VH amino acid sequence of SEQ ID NO: 9 and the VL amino acid sequence of SEQ ID NO: 11.

[1785] In some embodiments of any of the compositions or methods disclosed herein, the anti-TCRβV antibody molecule comprises an antigen binding domain comprising the VH amino acid sequence of SEQ ID NO: 1312 and the VL amino acid sequence of SEQ ID NO: 1314.

[1786] In some embodiments of any of the compositions or methods disclosed herein, the anti-TCRβV antibody molecule comprises an antigen binding domain comprising the amino acid sequence of SEQ ID NO: 1337, or a sequence with at least 85%, 90%, 95%, 96%, 97%, 98% or 99% identity thereto.

[1787] In some embodiments of any of the compositions or methods disclosed herein, the anti-TCRβV antibody molecule comprises an antigen binding domain comprising the amino acid sequence of SEQ ID NO: 1500, or a sequence with at least 85%, 90%, 95%, 96%, 97%, 98% or 99% identity thereto.

[1788] In some embodiments of any of the compositions or methods disclosed herein, the anti-TCRβV antibody molecule comprises a heavy chain comprising a framework region, e.g., framework region 3 (FR3), comprising one or both of: (i) a Threonine at position 73, e.g., a substitution at position 73 according to Kabat numbering, e.g., a Glutamic Acid to Threonine substitution; or (ii) a Glycine at position, e.g., a substitution at position 94 according to Kabat numbering, e.g., a Arginine to Glycine substitution. In some embodiments, the substitution is relative to a human germline heavy chain framework region sequence.

[1789] In some embodiments of any of the compositions or methods disclosed herein, the anti-TCRβV antibody molecule comprises a light chain comprising a framework region, e.g., framework region 1 (FR1), comprising a Phenylalanine at position 10, e.g., a substitution at position 10 according to Kabat numbering, e.g., a Serine to Phenyalanine substitution. In some embodiments, the substitution is relative to a human germline light chain framework region sequence.

[1790] In some embodiments of any of the compositions or methods disclosed herein, the anti-TCRβV antibody molecule comprises a light chain comprising a framework region, e.g., framework region 2 (FR2), comprising one or both of: (i) a Histidine at position 36, e.g., a substitution at position 36 according to Kabat numbering, e.g., a Tyrosine to Histidine substitution; or (ii) an Alanine at position 46, e.g., a substitution at position 46 according to Kabat numbering, e.g., a Arginine to Alanine substitution. In some embodiments, the substitution is relative to a human germline light chain framework region sequence.

[1791] In some embodiments of any of the compositions or methods disclosed herein, the anti-TCRβV antibody molecule comprises a light chain comprising a framework region, e.g., framework region 3 (FR3), comprising a Phenylalanine at position 87, e.g., a substitution at position 87 according to Kabat numbering, e.g., a Tyrosine to Phenyalanine substitution. In some embodiments, the substitution is relative to a human germline light chain framework region sequence.

[1792] In some embodiments of any of the compositions or methods disclosed herein, the anti-TCRβV antibody molecule binds to TCRβ V6, e.g., TCRβ V6-4*01, TCRβ V6-4*02, TCRβ V6-9*01, TCRβ V6-8*01, TCRβ V6-5*01, TCRβ V6-6*02, TCRβ V6-6*01, TCRβ V6-2*01, TCRβ V6-3*01 or TCRβ V6-1*01. In some embodiments the anti-TCRβV antibody molecule binds to TCRβ V6-5*01.

[1793] In some embodiments, TCRβ V6, e.g., TCRβ V6-4*01, TCRβ V6-4*02, TCRβ V6-9*01, TCRβ V6-8*01, TCRβ V6-5*01, TCRβ V6-6*02, TCRβ V6-6*01, TCRβ V6-2*01, TCRβ V6-3*01 or TCRβ V6-1*01, is recognized, e.g., bound, by SEQ ID NO: 1 and/or SEQ ID NO: 2. In some embodiments, TCRβ V6, e.g., TCRβ V6-4*01, TCRβ V6-4*02, TCRβ V6-9*01, TCRβ V6-8*01, TCRβ V6-5*01, TCRβ V6-6*02, TCRβ V6-6*01, TCRβ V6-2*01, TCRβ V6-3*01 or TCRβ V6-1*01, is recognized, e.g., bound, by SEQ ID NO: 9 and/or SEQ ID NO: 10. In some embodiments, TCRβ V6, e.g., TCRβ V6-4*01, TCRβ V6-4*02, TCRβ V6-9*01, TCRβ V6-8*01, TCRβ V6-5*01, TCRβ V6-6*02, TCRβ V6-6*01, TCRβ V6-2*01, TCRβ V6-3*01 or TCRβ V6-1*01, is recognized, e.g., bound, by SEQ ID NO: 9 and/or SEQ ID NO: 11. In some embodiments, TCRβ V6-5*01 is recognized, e.g., bound by SEQ ID NO: 9 and/or SEQ ID NO: 10, or a sequence having at least about 75%, 80%, 85%, 90%, 95%, or 99% sequence identity thereto. In some embodiments, TCRβ V6-5*01 is recognized, e.g., bound by SEQ ID NO: 9 and/or SEQ ID NO: 11, or a sequence having at least about 75%, 80%, 85%, 90%, 95%, or 99% sequence identity thereto.

[1794] In some embodiments of any of the compositions or methods disclosed herein, the anti-TCRβV antibody molecule comprises an antigen binding domain comprising:

[1795] (i) a heavy chain complementarity determining region (HC CDR1), a HC CDR2 and/or a HC CDR3 of SEQ ID NO: 15, SEQ ID NO: 23, SEQ ID NO: 24 or SEQ ID NO: 25, or a sequence disclosed in Table 2; and/or

[1796] (ii) a light chain complementarity determining region 1 (LC CDR1), a LC CDR2, and/or a LC CDR3 of SEQ ID NO: 16, SEQ ID NO: 26, SEQ ID NO: 27, SEQ ID NO: 28, SEQ ID NO: 29 or SEQ ID NO:30, or a sequence disclosed in Table 2.

[1797] In some embodiments of any of the compositions or methods disclosed herein, the anti-TCRβV antibody molecule comprises an antigen binding domain comprising a light chain variable region (VL) comprising one, two or all of a LC CDR1, a LC CDR2 and a LC CDR3 of SEQ ID NO: 16, SEQ ID NO: 26, SEQ ID NO: 27, SEQ ID NO: 28, SEQ ID NO: 29 or SEQ ID NO:30.

[1798] In some embodiments of any of the compositions or methods disclosed herein, the anti-TCRβV antibody molecule comprises an antigen binding domain comprising a heavy chain variable region (VH) comprising one, two or all of a HC CDR1, a HC CDR2 and a HC CDR3 of SEQ ID NO: 15, SEQ ID NO: 23, SEQ ID NO: 24 or SEQ ID NO: 25.

[1799] In some embodiments of any of the compositions or methods disclosed herein, the anti-TCRβV antibody molecule comprises an antigen binding domain comprising:

[1800] (i) a VL comprising: a LC CDR1 amino acid sequence of SEQ ID NO: 20 (or an amino acid sequence with not more than 1, 2, 3 or 4 modifications, e.g., substitutions, additions or deletions thereof), a LC CDR2 amino acid sequence of SEQ ID NO:21 (or an amino acid sequence with not more than 1, 2, 3 or 4 modifications, e.g., substitutions, additions or deletions thereof), and/or a LC CDR3 amino acid sequence of SEQ ID NO:22 (or an amino acid sequence with not more than 1, 2, 3 or 4 modifications, e.g., substitutions, additions or deletions thereof); and/or

[1801] (ii) a VH comprising: a HC CDR1 amino acid sequence of SEQ ID NO: 17 (or an amino acid sequence with not more than 1, 2, 3 or 4 modifications, e.g., substitutions, additions or deletions thereof), a HC CDR2 amino acid sequence of SEQ ID NO:18 (or an amino acid sequence with not more than 1, 2, 3 or 4 modifications, e.g., substitutions, additions or deletions thereof), and/or a HC CDR3 amino acid sequence of SEQ ID NO:19 (or an amino acid sequence with not more than 1, 2, 3 or 4 modifications, e.g., substitutions, additions or deletions thereof).

[1802] In some embodiments of any of the compositions or methods disclosed herein, the anti-TCRβV antibody molecule comprises an antigen binding domain comprising:

[1803] a variable heavy chain (VH) of SEQ ID NO: 23, SEQ ID NO: 24 or SEQ ID NO: 25, or a sequence having at least about 75%, 80%, 85%, 90%, 95%, or 99% sequence identity thereto; and/or

[1804] a variable light chain (VL) of SEQ ID NO: 26, SEQ ID NO: 27, SEQ ID NO: 28, SEQ ID NO: 29 or SEQ ID NO:30, or a sequence having at least about 75%, 80%, 85%, 90%, 95%, or 99% sequence identity thereto.

[1805] In some embodiments of any of the compositions or methods disclosed herein, the anti-TCRβV antibody molecule comprises a light chain comprising a framework region, e.g., framework region 1 (FR1), comprising one, two or all (e.g., three) of: (i) an Aspartic Acid at position 1, e.g., a substitution at position 1 according to Kabat numbering, e.g., a Alanine to Aspartic Acid substitution; or (ii) an Asparagine at position 2, e.g., a substitution at position 2 according to Kabat numbering, e.g., a Isoleucine to Asparagine substitution, a Serine to Asparagine substitution, or a Tyrosine to Asparagine substitution; or (iii) a Leucine at position 4, e.g., a substitution at position 4 according to Kabat numbering, e.g., a Methionine to Leucine substitution. In some embodiments, the substitution is relative to a human germline light chain framework region sequence.

[1806] In some embodiments of any of the compositions or methods disclosed herein, the anti-TCRβV antibody molecule comprises a light chain comprising a framework region, e.g., framework region 3 (FR3), comprising one, two or all (e.g., three) of: (i) a Glycine as position 66, e.g., a substitution at position 66 according to Kabat numbering, e.g., a Lysine to Glycine substitution, or a Serine to Glycine substitution; or (ii) an Asparagine at position 69, e.g., a substitution at position 69 according to Kabat numbering, e.g., a Threonine to Asparagine substitution; or (iii) a Tyrosine at position 71, e.g., a substitution at position 71 according to Kabat numbering, e.g., a Phenylalanine to Tyrosine substitution, or an Alanine to Tyrosine substitution. In some embodiments, the substitution is relative to a human germline light chain framework region sequence.

[1807] In some embodiments of any of the compositions or methods disclosed herein, the anti-TCRβV antibody molecule binds to TCRβ V12, e.g., TCRβ V12-4*01, TCRβ V12-3*01, or TCRβ V12-5*01. In some embodiments the anti-TCRβV antibody molecule binds to TCRβ V12-4*01 or TCRβ V12-3*01.

[1808] In some embodiments, TCRβ V12, e.g., TCRβ V12-4*01, TCRβ V12-3*01, or TCRβ V12-5*01 is recognized, e.g., bound, by SEQ ID NO: 15 and/or SEQ ID NO: 16. In some embodiments, TCRβ V12, e.g., TCRβ V12-4*01, TCRβ V12-3*01, or TCRβ V12-5*01, is recognized, e.g., bound, by any one of SEQ ID NOs 23-25, and/or any one of SEQ ID NO: 26-30, or an amino acid sequence having at least about 75%, 80%, 85%, 90%, 95%, or 99% sequence identity thereto. In some embodiments TCRβ V12-4*01 is recognized, e.g., bound, by any one of SEQ ID NOs 23-25, and/or any one of SEQ ID NO: 26-30, or an amino acid sequence having at least about 75%, 80%, 85%, 90%, 95%, or 99% sequence identity thereto. In some embodiments TCRβ V12-3*01 is recognized, e.g., bound, by any one of SEQ ID NOs 23-25, and/or any one of SEQ ID NO: 26-30, or an amino acid sequence having at least about 75%, 80%, 85%, 90%, 95%, or 99% sequence identity thereto.

[1809] In some embodiments of any of the compositions or methods disclosed herein, the anti-TCRβV antibody molecule comprises the anti-TCRβV antibody molecule comprises an antigen binding domain comprising a single chain Fv (scFv) or a Fab.

[1810] In some embodiments of any of the compositions or methods disclosed herein, the anti-TCRβV antibody molecule comprises binds to a conformational or a linear epitope on the T cell.

[1811] In some embodiments of any of the compositions or methods disclosed herein, the tumor comprises an antigen, e.g., a tumor antigen, e.g., a tumor associated antigen or a neoantigen. In some embodiments, the anti-TCRβV antibody molecule recognize, e.g., bind to, the tumor antigen.

[1812] In some embodiments of any of the compositions or methods disclosed herein, the anti-TCRβV antibody molecule is a full antibody (e.g., an antibody that includes at least one, and preferably two, complete heavy chains, and at least one, and preferably two, complete light chains), or an antigen-binding fragment (e.g., a Fab, F(ab′)₂, Fv, a single chain Fv fragment, a single domain antibody, a diabody (dAb), a bivalent antibody, or bispecific antibody or fragment thereof, a single domain variant thereof, a camelid antibody, or a rat-derived VH.

[1813] In some embodiments of any of the compositions or methods disclosed herein, the anti-TCRβV antibody molecule comprises the anti-TCRβV antibody molecule comprises one or more heavy chain constant regions chosen from IgG1, IgG2, IgG3, IgGA1, IgGA2, IgM, IgJ or IgG4, or a fragment thereof, e.g., as disclosed in Table 3.

[1814] In some embodiments of any of the compositions or methods disclosed herein, the anti-TCRβV antibody molecule comprises a heavy chain constant region of an IgM or a fragment thereof, optionally wherein the IgM heavy chain constant region comprises the sequence of SEQ ID NO: 73, or a sequence with at least 85%, 90%, 95%, or 99% sequence identity thereto. In some embodiments of any of the compositions or methods disclosed herein, the anti-TCRβV antibody molecule comprising an IgM constant region, further comprises a heavy chain constant region of an IgJ or a fragment thereof, optionally wherein the IgJ heavy chain constant region comprises the sequence of SEQ ID NO: 76 or a sequence with at least 85%, 90%, 95%, or 99% sequence identity thereto.

[1815] In some embodiments of any of the compositions or methods disclosed herein, the anti-TCRβV antibody molecule comprises a heavy chain constant region of an IgJ or a fragment thereof, optionally wherein the IgJ heavy chain constant region comprises the sequence of SEQ ID NO: 76 or a sequence with at least 85%, 90%, 95%, or 99% sequence identity thereto.

[1816] In some embodiments of any of the compositions or methods disclosed herein, the anti-TCRβV antibody molecule comprises a heavy chain constant region of an IgGA1, or a fragment thereof, optionally wherein the IgGA1 heavy chain constant region comprises the sequence of SEQ ID NO: 74, or a sequence with at least 85%, 90%, 95%, or 99% sequence identity thereto.

[1817] In some embodiments of any of the compositions or methods disclosed herein, the anti-TCRβV antibody molecule comprises a heavy chain constant region of an IgGA2, or a fragment thereof, optionally wherein the IgGA2 heavy chain constant region comprises a sequence listed in Table 3, e.g., SEQ ID NO: 75, or a sequence with at least 85%, 90%, 95%, or 99% sequence identity thereto.

[1818] In some embodiments of any of the compositions or methods disclosed herein, binding of the anti-TCRβV antibody molecule to a TCRβV region results in a cytokine profile, e.g., a cytokine secretion profile, (e.g., comprising one or more cytokines and/or one or more chemokines), that differs from that of a T cell engager that binds to a receptor or molecule other than a TCRβV region (“a non-TCRβV-binding T cell engager”).

[1819] In some embodiments, the cytokine profile, e.g., cytokine secretion profile, comprises the level and/or activity of one or more cytokines and/or one or more chemokines (e.g., as described herein). In an embodiment, a cytokine profile, e.g., a cytokine secretion profile, comprises the level and/or activity of one or more of: IL-2 (e.g., full length, a variant, or a fragment thereof); IL-1beta (e.g., full length, a variant, or a fragment thereof); IL-6 (e.g., full length, a variant, or a fragment thereof); TNFα (e.g., full length, a variant, or a fragment thereof); IFNg (e.g., full length, a variant, or a fragment thereof) IL-10 (e.g., full length, a variant, or a fragment thereof); IL-4 (e.g., full length, a variant, or a fragment thereof); TNF alpha (e.g., full length, a variant, or a fragment thereof); IL-12p70 (e.g., full length, a variant, or a fragment thereof); IL-13 (e.g., full length, a variant, or a fragment thereof); IL-8 (e.g., full length, a variant, or a fragment thereof); Eotaxin (e.g., full length, a variant, or a fragment thereof); Eotaxin-3 (e.g., full length, a variant, or a fragment thereof); IL-8 (HA) (e.g., full length, a variant, or a fragment thereof); IP-10 (e.g., full length, a variant, or a fragment thereof); MCP-1 (e.g., full length, a variant, or a fragment thereof); MCP-4 (e.g., full length, a variant, or a fragment thereof); MDC (e.g., full length, a variant, or a fragment thereof); MIP-1a (e.g., full length, a variant, or a fragment thereof); MIP-1b (e.g., full length, a variant, or a fragment thereof); TARC (e.g., full length, a variant, or a fragment thereof); GM-CSF (e.g., full length, a variant, or a fragment thereof); IL-12 23p40 (e.g., full length, a variant, or a fragment thereof); IL-15 (e.g., full length, a variant, or a fragment thereof); IL-16 (e.g., full length, a variant, or a fragment thereof); IL-17a (e.g., full length, a variant, or a fragment thereof); IL-1a (e.g., full length, a variant, or a fragment thereof); IL-5 (e.g., full length, a variant, or a fragment thereof); IL-7 (e.g., full length, a variant, or a fragment thereof); TNF-beta (e.g., full length, a variant, or a fragment thereof); or VEGF (e.g., full length, a variant, or a fragment thereof).

[1820] In some embodiments, the cytokine profile, e.g., cytokine secretion profile, comprises one, two, three, four, five, six, seven, or all of the following:

[1821] (i) increased level, e.g., expression level, and/or activity of IL-2;

[1822] (ii) reduced level, e.g., expression level, and/or activity of IL-1β;

[1823] (iii) reduced level, e.g., expression level, and/or activity of IL-6;

[1824] (iv) reduced level, e.g., expression level, and/or activity of TNFα;

[1825] (v) reduced level, e.g., expression level, and/or activity of IL-10;

[1826] (vi) a delay, e.g., at least 1, 2, 3, 4, 5, 6, 7, 8, 9, 10 or more hours delay, in increased level, e.g., expression level, and/or activity of IL-2;

[1827] (vii) a delay, e.g., at least 1, 2, 3, 4, 5, 6, 7, 8, 9, 10 hours delay, in increased level, e.g., expression level, and/or activity of IFNg; or

[1828] (viii) increased level, e.g., expression level, and/or activity of IL-15, e.g., wherein (i)-(viii) are relative to the cytokine profile, e.g., cytokine secretion profile, of the non-TCRβV-binding T cell engager.

[1829] In some embodiments, binding of the anti-TCRBV antibody to a TCRβV region results in reduced cytokine storm, e.g., reduced cytokine release syndrome (CRS) and/or neurotoxicity (NT), as measured by an assay of Example 3, e.g., relative to the cytokine storm induced by the non-TCRβV-binding T cell engager.

[1830] In some embodiments, binding of the anti-TCRBV antibody to a TCRβV region results in one, two, three or all of:

[1831] (ix) reduced T cell proliferation kinetics;

[1832] (x) cell killing, e.g., target cell killing, e.g. cancer cell killing, e.g., as measured by an assay of Example 4;

[1833] (xi) increased Natural Killer (NK) cell proliferation, e.g., expansion; or

[1834] (xii) expansion, e.g., at least about 1.1-10 fold expansion (e.g., at least about 1.1, 1.2, 1.3, 1.4, 1.5, 2, 3, 4, 5, 6, 7, 8, 9, or 10 fold expansion), of a population of T cells having a memory-like phenotype,

[1835] e.g., wherein (ix)-(xii) are relative to the non-TCRβV-binding T cell engager.

[1836] In some embodiments, an anti-TCRβV antibody molecule disclosed herein recognizes (e.g., binds to), a structurally conserved domain on the TCRβV protein (e.g., as denoted by the circled area in FIG. 24A).

[1837] In some embodiments, an anti-TCRβV antibody molecule disclosed herein does not recognize, e.g., bind to, an interface of a TCRβV:TCRalpha complex.

[1838] In some embodiments, an anti-TCRβV antibody molecule disclosed herein does not recognize, e.g., bind to, a constant region of a TCRβV protein. An exemplary antibody that binds to a constant region of a TCRBV region is JOVI.1 as described in Viney et al., (Hybridoma. 1992 December; 11(6):701-13).

[1839] In some embodiments, an anti-TCRβV antibody molecule disclosed herein does not recognize, e.g., bind to, one or more (e.g., all) of a complementarity determining region (e.g., CDR1, CDR2 and/or CDR3) of a TCRβV protein.

[1840] In some embodiments of any of the compositions or methods disclosed herein, the anti-TCRβV antibody molecule comprises a light chain constant region chosen from the light chain constant regions of kappa or lambda, or a fragment thereof, e.g., as disclosed in Table 3.

[1841] In some embodiments of any of the compositions or methods disclosed herein, the anti-TCRβV antibody molecule comprises a light chain constant region of a kappa chain, or a fragment thereof, optionally wherein the kappa chain constant region comprises the sequence of SEQ ID NO: 39, or a sequence with at least 85%, 90%, 95%, or 99% sequence identity thereto

[1842] In some embodiments of any of the compositions or methods disclosed herein, the anti-TCRβV antibody molecule comprises:

[1843] (i) one or more heavy chain constant regions comprising a heavy chain constant region chosen from IgG1, IgG2, IgG3, IgGA1, IgGA2, IgG4, IgJ, IgM, IgD, or IgE, or a fragment thereof, e.g., as described in Table 3; and

[1844] (ii) a light chain constant region comprising a light chain constant region chosen from the light chain constant regions of kappa or lambda, or a fragment thereof, e.g., as described in Table 3.

[1845] In some embodiments of any of the compositions or methods disclosed herein, the anti-TCRβV antibody molecule comprises or a cell comprising an anti-TCRβV antibody molecule comprises:

[1846] (i) a heavy chain comprising a variable region (VH), e.g., a VH of an antibody disclosed herein; and/or one or more heavy chain constant regions, e.g., as disclosed herein; and/or

[1847] (ii) a light chain comprising a variable light (VL), e.g., a VL of an antibody disclosed herein; and/or one or more light chain constant regions, e.g., as disclosed herein.

[1848] In some embodiments of any of the compositions or methods disclosed herein, the anti-TCRβV antibody molecule comprises, or a cell comprising an anti-TCRβV antibody molecule comprises:

[1849] (i) a heavy chain comprising a heavy chain constant region comprising:

[1850] (a) an IgM heavy chain constant region or a fragment thereof, comprising the sequence of SEQ ID NO: 73, or a sequence with at least 85%, 90%, 95%, or 99% sequence identity thereto;

[1851] (b) an IgGA1 heavy chain constant region or a fragment thereof, comprising the sequence of SEQ ID NO: 74, or a sequence with at least 85%, 90%, 95%, or 99% sequence identity thereto; or

[1852] (c) an IgGA2 heavy chain constant region or a fragment thereof, comprising the sequence of SEQ ID NO: 75, or a sequence with at least 85%, 90%, 95%, or 99% sequence identity thereto; and

[1853] (ii) a light chain comprising a light chain constant region comprising a kappa chain constant region comprising the sequence of SEQ ID NO: 39, or a sequence with at least 85%, 90%, 95%, or 99% sequence identity thereto, optionally wherein, the anti-TCRβV antibody molecule further comprises an IgJ heavy chain constant region or a fragment thereof, wherein the IgJ heavy chain constant region comprises the sequence of SEQ ID NO: 76 or a sequence with at least 85%, 90%, 95%, or 99% sequence identity thereto.

[1854] In some embodiments of any of the compositions or methods disclosed herein, the anti-TCRβV antibody molecule comprises, or a cell comprising an anti-TCRβV antibody molecule comprises:

[1855] (i) a heavy chain comprising: a VH chosen from a VH of Tables 1-2 or 10-13, or a sequence with at least 85%, 90%, 95%, or 99% sequence identity thereto; and a heavy chain constant region comprising:

[1856] (a) an IgM heavy chain constant region or a fragment thereof, comprising the sequence of SEQ ID NO: 73, or a sequence with at least 85%, 90%, 95%, or 99% sequence identity thereto;

[1857] (b) an IgGA1 heavy chain constant region or a fragment thereof, comprising the sequence of SEQ ID NO: 74, or a sequence with at least 85%, 90%, 95%, or 99% sequence identity thereto; or

[1858] (c) an IgGA2 heavy chain constant region or a fragment thereof, comprising the sequence of SEQ ID NO: 75, or a sequence with at least 85%, 90%, 95%, or 99% sequence identity thereto; and

[1859] (ii) a light chain comprising: a VL chosen from a VL of Tables 1-2 or 10-13, or a sequence with at least 85%, 90%, 95%, or 99% sequence identity thereto; and a light chain constant region comprising a kappa chain constant region comprising the sequence of SEQ ID NO: 39, or a sequence with at least 85%, 90%, 95%, or 99% sequence identity thereto, optionally wherein, the anti-TCRβV antibody molecule further comprises an IgJ heavy chain constant region or a fragment thereof, wherein the IgJ heavy chain constant region comprises the sequence of SEQ ID NO: 76 or a sequence with at least 85%, 90%, 95%, or 99% sequence identity thereto.

[1860] In some embodiments of any of the methods disclosed herein, the anti-TCRβV antibody molecule binds to one or more (e.g., all) of the following TCRβV subfamilies:

[1861] (i) TCRβ V6 subfamily comprising, e.g., one or more of TCRβ V6-4*01, TCRβ V6-4*02, TCRβ V6-9*01, TCRβ V6-8*01, TCRβ V6-5*01, TCRβ V6-6*02, TCRβ V6-6*01, TCRβ V6-2*01, TCRβ V6-3*01 or TCRβ V6-1*01;

[1862] (ii) TCRβ V10 subfamily comprising, e.g., one or more of TCRβ V10-1*01, TCRβ V10-1*02, TCRβ V10-3*01 or TCRβ V10-2*01;

[1863] (iii) TCRβ V5 subfamily comprising, e.g., one or more of TCRβ V5-6*01, TCRβ V5-4*01, or TCRβ V5-8*01;

[1864] (iv) TCRβ V12 subfamily comprising e.g., one or more of TCRβ V12-4*01, TCRβ V12-3*01, or TCRβ V12-5*01;

[1865] (v) TCRβ V7 subfamily comprising e.g., one or more of TCRβ V7-7*01, TCRβ V7-6*01, TCRβ V7-8*02, TCRβ V7-4*01, TCRβ V7-2*02, TCRβ V7-2*03, TCRβ V7-2*01, TCRβ V7-3*01, TCRβ V7-9*03, or TCRβ V7-9*01;

[1866] (vi) TCRβ V11 subfamily comprising e.g., one or more of TCRβ V11-1*01, TCRβ V11-2*01 or TCRβ V11-3*01;

[1867] (vii) TCRβ V14 subfamily comprising TCRβ V14*01;

[1868] (viii) TCRβ V16 subfamily comprising TCRβ V16*01;

[1869] (ix) TCRβ V18 subfamily comprising TCRβ V18*01;

[1870] (x) TCRβ V9 subfamily comprising T e.g., one or more of CRβ V9*01 or TCRβ V9*02;

[1871] (xi) TCRβ V13 subfamily comprising TCRβ V13*01;

[1872] (xii) TCRβ V4 subfamily comprising e.g., one or more of e.g., one or more of TCRβ V4-2*01, TCRβ V4-3*01, or TCRβ V4-1*01;

[1873] (xiii) TCRβ V3 subfamily comprising TCRβ V3-1*01;

[1874] (xiv) TCRβ V2 subfamily comprising TCRβ V2*01;

[1875] (xv) TCRβ V15 subfamily comprising TCRβ V15*01;

[1876] (xvi) TCRβ V30 subfamily comprising e.g., one or more of TCRβ V30*01, or TCRβ V30*02;

[1877] (xvii) TCRβ V19 subfamily comprising e.g., one or more of TCRβ V19*01, or TCRβ V19*02;

[1878] (xviii) TCRβ V27 subfamily comprising TCRβ V27*01;

[1879] (xix) TCRβ V28 subfamily comprising TCRβ V28*01;

[1880] (xx) TCRβ V24 subfamily comprising TCRβ V24-1*01;

[1881] (xxi) TCRβ V20 subfamily comprising e.g., one or more of TCRβ V20-1*01, or TCRβ V20-1*02;

[1882] (xxii) TCRβ V25 subfamily comprising TCRβ V25-1*01; or

[1883] (xxiii) TCRβ V29 subfamily comprising TCRβ V29-1*01;

[1884] (xxiv) TCRβ V21 subfamily;

[1885] (xxv) TCRβ V1 subfamily;

[1886] (xxvi) TCRβ V17 subfamily;

[1887] (xvii) TCRβ V23 subfamily; or

[1888] (xviii) TCRβ V26 subfamily.

[1889] In some embodiments of any of the methods disclosed herein, the anti-TCRβV antibody molecule binds to one or more (e.g., all) of the following TCRβV subfamilies:

[1890] (i) TCRβ V6, e.g., TCRβ V6-4*01, TCRβ V6-4*02, TCRβ V6-9*01, TCRβ V6-8*01, TCRβ V6-5*01, TCRβ V6-6*02, TCRβ V6-6*01, TCRβ V6-2*01, TCRβ V6-3*01 or TCRβ V6-1*01;

[1891] (ii) TCRβ V10, e.g., TCRβ V10-1*01, TCRβ V10-1*02, TCRβ V10-3*01 or TCRβ V10-2*01;

[1892] (iii) TCRβ V12, e.g., TCRβ V12-4*01, TCRβ V12-3*01, or TCRβ V12-5*01; or

[1893] (iv) TCRβ V5, e.g., TCRβ V5-5*01, TCRβ V5-6*01, TCRβ V5-4*01, TCRβ V5-8*01, TCRβ V5-1*01.

[1894] In some embodiments, the anti-TCRβV antibody molecule binds to TCRβ V6, e.g., TCRβ V6-4*01, TCRβ V6-4*02, TCRβ V6-9*01, TCRβ V6-8*01, TCRβ V6-5*01, TCRβ V6-6*02, TCRβ V6-6*01, TCRβ V6-2*01, TCRβ V6-3*01 or TCRβ V6-1*01. In some embodiments, the anti-TCRβV antibody molecule binds to TCRβ V6-5*01.

[1895] In some embodiments, the anti-TCRβV antibody molecule does not bind to TCRβ V12.

[1896] In some embodiments, the anti-TCRβV antibody molecule does not bind to TCRβ V5-5*01 or TCRβ V5-1*01.

[1897] In some embodiments of any of the methods disclosed herein, the anti-TCRβV antibody molecule does not bind to TCRβ V12, or binds to TCRβ V12 with an affinity and/or binding specificity that is less than (e.g., less than about 10%, 20%, 30%, 40%, 50%, 60%, 70%, 80%, 90% or about 2-, 5-, or 10-fold) the affinity and/or binding specificity of the 16G8 murine antibody or a humanized version thereof as described in U.S. Pat. No. 5,861,155.

[1898] In some embodiments of any of the methods disclosed herein, the anti-TCRβV antibody molecule binds to TCRβ V12 with an affinity and/or binding specificity that is greater than (e.g., greater than about 10%, 20%, 30%, 40%, 50%, 60%, 70%, 80%, 90% or about 2-, 5-, or 10-fold) the affinity and/or binding specificity of the 16G8 murine antibody or a humanized version thereof as described in U.S. Pat. No. 5,861,155.

[1899] In some embodiments of any of the methods disclosed herein, the anti-TCRβV antibody molecule binds to a TCRβV region other than TCRβ V12 (e.g., TCRβV region as described herein, e.g., TCRβ V6 subfamily (e.g., TCRβ V6-5*01) with an affinity and/or binding specificity that is greater than (e.g., greater than about 10%, 20%, 30%, 40%, 50%, 60%, 70%, 80%, 90% or about 2-, 5-, or 10-fold) the affinity and/or binding specificity of the 16G8 murine antibody or a humanized version thereof as described in U.S. Pat. No. 5,861,155.

[1900] In some embodiments of any of the methods disclosed herein, the anti-TCRβV antibody molecule does not comprise at least one CDR of Antibody B. In some embodiments of any of the methods disclosed herein, the anti-TCRβV antibody molecule does not comprise the CDRs of Antibody B.

[1901] In some embodiments of any of the methods disclosed herein, the anti-TCRβV antibody molecule does not bind to TCRβ V5-5*01 or TCRβ V5-1*01, or binds to TCRβ V5-5*01 or TCRβ V5-1*01 with an affinity and/or binding specificity that is less than (e.g., less than about 10%, 20%, 30%, 40%, 50%, 60%, 70%, 80%, 90% or about 2-, 5-, or 10-fold) the affinity and/or binding specificity of the TM23 murine antibody or a humanized version thereof as described in U.S. Pat. No. 5,861,155.

[1902] In some embodiments of any of the methods disclosed herein, the anti-TCRβV antibody molecule binds to TCRβ V5-5*01 or TCRβ V5-1*01 with an affinity and/or binding specificity that is greater than (e.g., greater than about 10%, 20%, 30%, 40%, 50%, 60%, 70%, 80%, 90% or about 2-, 5-, or 10-fold) the affinity and/or binding specificity of the TM23 murine antibody or a humanized version thereof as described in U.S. Pat. No. 5,861,155.

[1903] In some embodiments of any of the methods disclosed herein, the anti-TCRβV antibody molecule binds to a TCRβV region other than TCRβ V5-5*01 or TCRβ V5-1*01 (e.g., TCRβV region as described herein, e.g., TCRβ V6 subfamily (e.g., TCRβ V6-5*01) with an affinity and/or binding specificity that is greater than (e.g., greater than about 10%, 20%, 30%, 40%, 50%, 60%, 70%, 80%, 90% or about 2-, 5-, or 10-fold) the affinity and/or binding specificity of the TM23 murine antibody or a humanized version thereof as described in U.S. Pat. No. 5,861,155.

[1904] In some embodiments of any of the methods disclosed herein, the anti-TCRβV antibody molecule does not comprise at least one CDR of the TM23 murine antibody. In some embodiments of any of the methods disclosed herein, the anti-TCRβV antibody molecule does not comprise the CDRs of the TM23 murine antibody.

[1905] In some embodiments of any of the methods disclosed herein, an anti-TCRβV antibody molecule disclosed herein does not comprise the sequence of a murine anti-rat TCR antibody R73, e.g., as disclosed in J Exp Med. 1989 Jan. 1; 169(1): 73-86, herein incorporated by reference in its entirety. In some embodiments of any of the methods disclosed herein, a multispecific antibody molecule disclosed herein does not comprise the sequence of a murine anti-rat TCR antibody R73, e.g., as disclosed in J Immunol. 1993 Mar. 15; 150(6):2305-15, herein incorporated by reference in its entirety.

[1906] In some embodiments of any of the methods disclosed herein, an anti-TCRβV antibody molecule disclosed herein does not comprise a viral peptide-WIC complex, e.g., as disclosed in Oncoimmunology. 2016; 5(1): e1052930, herein incorporated by reference in its entirety. In some embodiments of any of the methods disclosed herein, a multispecific antibody molecule disclosed herein does not comprise a viral peptide-WIC complex, e.g., as disclosed in Oncoimmunology. 2016; 5(1): e1052930, herein incorporated by reference in its entirety.

[1907] In some embodiments of a method disclosed herein, the immune cell population comprises a T cell, a Natural Killer cell, a B cell, an antigen presenting cell, or a myeloid cell (e.g., a monocyte, a macrophage, a neutrophil or a granulocyte).

[1908] In some embodiments of a method disclosed herein, the immune cell population comprises a T cell, e.g., a CD4+ T cell, a CD8+ T cell, a TCR alpha-beta T cell, or a TCR gamma-delta T cell. In some embodiments, a T cell comprises a memory T cell (e.g., a central memory T cell, or an effector memory T cell (e.g., a TEMRA) or an effector T cell. In some embodiments, a T cell comprises a tumor infiltrating lymphocyte (TIL).

[1909] In some embodiments of a method disclosed herein, the immune cell population is obtained from a healthy subject.

[1910] In some embodiments of a method disclosed herein, the immune cell population is obtained from a subject (e.g., from an apheresis sample from the subject) having a disease, e.g., a cancer, e.g., as described herein. In some embodiments, the immune cell population obtained from a subject having a disease, e.g., a cancer, comprises a tumor infiltrating lymphocyte (TIL).

[1911] In some embodiments of a method disclosed herein, the method results in an expansion of at least 1.1-10 fold (e.g., at least 1.1, 1.2, 1.3, 1.4, 1.5, 2, 3, 4, 5, 6, 7, 8, 9, or 10 fold expansion).

[1912] In some embodiments of a method disclosed herein, the method further comprises contacting the population of cells with an agent that promotes, e.g., increases, immune cell expansion. In some embodiments, the agent includes an immune checkpoint inhibitor, e.g., as described herein. In some embodiments, the agent includes a 4-1BB (CD127) agonist, e.g., an anti-4-1BB antibody.

[1913] In some embodiments of a method disclosed herein, the method further comprises comprising contacting the population of cells with a non-dividing population of cells, e.g., feeder cells, e.g., irradiated allogenic human PBMCs.

[1914] In some embodiments of a method disclosed herein, an expansion method described herein comprises expanding the cells for a period of at least about 4 hours, 6 hours, 10 hours, 12 hours, 15 hours, 18 hours, 20 hours, or 22 hours, or for at least 1, 2, 3, 4, 5, 6, 7, 8, 9, 10, 11, 12, 13, 14, 15, 1, 6 17, 18, 19, 20 or 21 days, or for at least about 1 week, 2 weeks, 3 weeks, 4 weeks, 5 weeks, 6 weeks, 7 weeks or 8 weeks.

[1915] In some embodiments of a method disclosed herein, expansion of the population of immune cells, is compared to expansion of a similar population of cells with an antibody that binds to: a CD3 molecule, e.g., CD3 epsilon (CD3e) molecule; or a TCR alpha (TCRα) molecule.

[1916] In some embodiments of a method disclosed herein, expansion of the population of immune cells, is compared to expansion of a similar population of cells not contacted with the anti-TCRβV antibody molecule.

[1917] In some embodiments of a method disclosed herein, expansion of the population of memory effector T cells, e.g., TEM cells, e.g., TEMRA cells, is compared to expansion of a similar population of cells with an antibody that binds to: a CD3 molecule, e.g., CD3 epsilon (CD3e) molecule; or a TCR alpha (TCRα) molecule.

[1918] In some embodiments of a method disclosed herein, the method results in expansion of, e.g., selective or preferential expansion of, T cells expressing a T cell receptor (TCR) comprising a TCR alpha and/or TCR beta molecule, e.g., TCR alpha-beta T cells (αβ T cells).

[1919] In some embodiments of a method disclosed herein, the method results in expansion of αβT cells over expansion of T cells expressing a TCR comprising a TCR gamma and/or TCR delta molecule, e.g., TCR gamma-delta T cells (γδ T cells). In some embodiments, expansion of αβT cells over γδ T cells results in reduced production of cytokines associated with CRS. In some embodiments, expansion of αβT cells over γδ T cells results in immune cells that have reduced capacity to, e.g., are less prone to, induce CRS upon administration into a subject.

[1920] In some embodiments of a method disclosed herein, an immune cell population (e.g., T cells (e.g., TEMRA cells or TILs) or NK cells) cultured in the presence of, e.g., expanded with, an anti-TCRβV antibody disclosed herein does not induce CRS and/or NT when administered into a subject, e.g., a subject having a disease or condition as described herein.

[1921] In some embodiments, the anti-TCRβV antibody molecule in a multispecific molecule disclosed herein is a first immune cell engager moiety. In some embodiments, the anti-TCRβV antibody molecule does not bind to TCRβ V12, or binds to TCRβ V12 with an affinity and/or binding specificity that is less than (e.g., less than about 10%, 20%, 30%, 40%, 50%, 60%, 70%, 80%, 90% or about 2-, 5-, or 10-fold) the affinity and/or binding specificity of the 16G8 murine antibody or a humanized version thereof as described in U.S. Pat. No. 5,861,155. In some embodiments, the anti-TCRβV antibody molecule binds to TCRβ V12 with an affinity and/or binding specificity that is greater than (e.g., greater than about 10%, 20%, 30%, 40%, 50%, 60%, 70%, 80%, 90% or about 2-, 5-, or 10-fold) the affinity and/or binding specificity of the 16G8 murine antibody or a humanized version thereof as described in U.S. Pat. No. 5,861,155. In some embodiments, the anti-TCRβV antibody molecule binds to a TCRβV region other than TCRβ V12 (e.g., TCRβV region as described herein, e.g., TCRβ V6 subfamily (e.g., TCRβ V6-5*01) with an affinity and/or binding specificity that is greater than (e.g., greater than about 10%, 20%, 30%, 40%, 50%, 60%, 70%, 80%, 90% or about 2-, 5-, or 10-fold) the affinity and/or binding specificity of the 16G8 murine antibody or a humanized version thereof as described in U.S. Pat. No. 5,861,155. In some embodiments, the anti-TCRβV antibody molecule does not comprise the CDRs of the Antibody B murine antibody.

[1922] In some embodiments, the anti-TCRβV antibody molecule in a multispecific molecule disclosed herein is a first immune cell engager moiety. In some embodiments, the anti-TCRβV antibody molecule does not bind to TCRβ V5-5*01 or TCRβ V5-1*01, or binds to TCRβ V5-5*01 or TCRβ V5-1*01 with an affinity and/or binding specificity that is less than (e.g., less than about 10%, 20%, 30%, 40%, 50%, 60%, 70%, 80%, 90% or about 2-, 5-, or 10-fold) the affinity and/or binding specificity of the TM23 murine antibody or a humanized version thereof as described in U.S. Pat. No. 5,861,155. In some embodiments, the anti-TCRβV antibody molecule binds to TCRβ V5-5*01 or TCRβ V5-1*01 with an affinity and/or binding specificity that is greater than (e.g., greater than about 10%, 20%, 30%, 40%, 50%, 60%, 70%, 80%, 90% or about 2-, 5-, or 10-fold) the affinity and/or binding specificity of the TM23 murine antibody or a humanized version thereof as described in U.S. Pat. No. 5,861,155. In some embodiments, the anti-TCRβV antibody molecule binds to a TCRβV region other than TCRβ V5-5*01 or TCRβ V5-1*01 (e.g., TCRβV region as described herein, e.g., TCRβ V6 subfamily (e.g., TCRβ V6-5*01) with an affinity and/or binding specificity that is greater than (e.g., greater than about 10%, 20%, 30%, 40%, 50%, 60%, 70%, 80%, 90% or about 2-, 5-, or 10-fold) the affinity and/or binding specificity of the TM23 murine antibody or a humanized version thereof as described in U.S. Pat. No. 5,861,155. In some embodiments, the anti-TCRβV antibody molecule does not comprise the CDRs of the TM23 murine antibody.

[1923] In some embodiments, the multispecific molecule further comprises a second immune cell engager moiety. In some embodiments, the first and/or second immune cell engager binds to and activates an immune cell, e.g., an effector cell. In some embodiments, the first and/or second immune cell engager binds to, but does not activate, an immune cell, e.g., an effector cell. In some embodiments, the second immune cell engager is chosen from an NK cell engager, a T cell engager, a B cell engager, a dendritic cell engager, or a macrophage cell engager, or a combination thereof. In some embodiments, the second immune cell engager comprises a T cell engager which binds to CD3, TCRα, TCRγ, TCRζ, ICOS, CD28, CD27, HVEM, LIGHT, CD40, 4-1BB, OX40, DR3, GITR, CD30, TIM1, SLAM, CD2, or CD226.

[1924] In some embodiments, a multispecific molecule disclosed herein comprises a tumor targeting moiety. In some embodiment, the tumor-targeting moiety comprises an antibody molecule (e.g., Fab or scFv), a receptor molecule (e.g., a receptor, a receptor fragment or functional variant thereof), or a ligand molecule (e.g., a ligand, a ligand fragment or functional variant thereof), or a combination thereof, that binds to a cancer antigen. In some embodiments, the tumor-targeting moiety binds to a cancer antigen present on a cancer, e.g., a hematological cancer, a solid tumor, a metastatic cancer, soft tissue tumor, metastatic lesion, or a combination thereof. In some embodiments, the tumor-targeting moiety binds to a cancer antigen, e.g., BCMA or FcRH5.

[1925] In some embodiments, the tumor-targeting antibody molecule binds to a conformational or a linear epitope on the tumor antigen.

[1926] In some embodiments of any of the compositions or methods disclosed herein, the tumor-targeting moiety is an antigen, e.g., a cancer antigen. In some embodiments, the cancer antigen is a tumor antigen or stromal antigen, or a hematological antigen.

[1927] In some embodiments of any of the compositions or methods disclosed herein, the tumor-targeting moiety binds to a cancer antigen chosen from: BCMA, FcRH5, CD19, CD20, CD22, CD30, CD33, CD38, CD47, CD99, CD123, FcRH5, CLEC12, CD179A, SLAMF7, or NY-ES01, PDL1, CD47, gangloside 2 (GD2), prostate stem cell antigen (PSCA), prostate specific membrane antigen (PMSA), prostate-specific antigen (PSA), carcinoembryonic antigen (CEA), Ron Kinase, c-Met, Immature laminin receptor, TAG-72, BING-4, Calcium-activated chloride channel 2, Cyclin-B1, 9D7, Ep-CAM, EphA3, Her2/neu, Telomerase, SAP-1, Survivin, NY-ESO-1/LAGE-1, PRAME, SSX-2, Melan-A/MART-1, Gp100/pme117, Tyrosinase, TRP-1/-2, MC1R, β-catenin, BRCA1/2, CDK4, CML66, Fibronectin, p53, Ras, TGF-B receptor, AFP, ETA, MAGE, MUC-1, CA-125, BAGE, GAGE, NY-ESO-1, β-catenin, CDK4, CDC27, a actinin-4, TRP1/gp75, TRP2, gp100, Melan-A/MART1, gangliosides, WT1, EphA3, Epidermal growth factor receptor (EGFR), MART-2, MART-1, MUC1, MUC2, MUM1, MUM2, MUM3, NA88-1, NPM, 0A1, OGT, RCC, RUI1, RUI2, SAGE, TRG, TRP1, TSTA, Folate receptor alpha, L1-CAM, CAIX, gpA33, GD3, GM2, VEGFR, Integrins (Integrin alphaVbeta3, Integrin alpha5Beta1), Carbohydrates (Le), IGF1R, EPHA3, TRAILR1, TRAILR2, RANKL, (FAP), TGF-beta, hyaluronic acid, collagen, e.g., collagen IV, tenascin C, or tenascin W.

[1928] In some embodiments of any of the compositions or methods disclosed herein, the cancer is a solid tumor including but not limited to: pancreatic (e.g., pancreatic adenocarcinoma) cancer, breast cancer, colorectal cancer, lung cancer (e.g., small or non-small cell lung cancer), skin cancer, ovarian cancer, or liver cancer.

[1929] In some embodiments of any of the compositions or methods disclosed herein, the cancer antigen or tumor antigen is a hematological antigen. In some embodiments, the cancer or tumor antigen is chosen from one or more of: BCMA, FcRH5, CD19, CD20, CD22, CD30, CD33, CD38, CD47, CD99, CD123, FcRH5, CLEC12, CD179A, SLAMF7, or NY-ES01. In some embodiments, the tumor-targeting moiety binds to one or both of BCMA or FcRH5.

[1930] In some embodiments, the tumor-targeting moiety binds to BCMA. In embodiments, the tumor-targeting moiety comprises a BCMA targeting moiety. In some embodiments, the tumor-targeting moiety comprising a BCMA targeting moiety binds to a BCMA antigen on the surface of a cell, e.g., a cancer or hematopoietic cell. The BCMA antigen can be present on a primary tumor cell, or a metastatic lesion thereof. In some embodiments, the cancer is a hematological cancer, e.g., multiple myeloma. For example, the BCMA antigen can be present on a tumor, e.g., a tumor of a class typified by having one or more of: limited tumor perfusion, compressed blood vessels, or fibrotic tumor interstitium. In some embodiments, the tumor targeting moiety comprising a BCMA targeting moiety comprises an anti-BCMA antibody or antigen-binding fragment thereof described in U.S. Pat. Nos. 8,920,776, 9,243,058, 9,340,621, 8,846,042, 7,083,785, 9,545,086, 7,276,241, 9,034,324, 7,799,902, 9,387,237, 8,821,883, US861745, US20130273055, US20160176973, US20150368351, US20150376287, US20170022284, US20160015749, US20140242077, US20170037128, US20170051068, US20160368988, US20160311915, US20160131654, US20120213768, US20110177093, US20160297885, EP3137500, EP2699259, EP2982694, EP3029068, EP3023437, WO2016090327, WO2017021450, WO2016110584, WO2016118641, WO2016168149, the entire contents of which are incorporated herein by reference.

[1931] In some embodiments, the BCMA-targeting moiety includes an antibody molecule (e.g., Fab or scFv) that binds to BCMA. In some embodiments, the antibody molecule to BCMA comprises one, two, or three CDRs from any of the heavy chain variable domain sequences of Table 9, or a closely related CDR, e.g., CDRs which have at least one amino acid alteration, but not more than two, three or four alterations (e.g., substitutions, deletions, or insertions, e.g., conservative substitutions) from any of the CDR sequences of Table 9. In some embodiments, the antibody molecule to BCMA comprises a heavy chain variable domain sequence chosen from any of the amino acid sequences of Table 9, or an amino acid sequence substantially identical thereto (e.g., 95% to 99.9% identical thereto, or having at least one amino acid alteration, but not more than five, ten or fifteen alterations (e.g., substitutions, deletions, or insertions, e.g., conservative substitutions)).

[1932] In some embodiments, the tumor-targeting moiety binds to FcRH5. In embodiments, the tumor-targeting moiety comprises a FcRH5targeting moiety. In some embodiments, the tumor-targeting moiety comprising a FcRH5targeting moiety binds to a FcRH5antigen on the surface of a cell, e.g., a cancer or hematopoietic cell. The FcRH5antigen can be present on a primary tumor cell, or a metastatic lesion thereof. In some embodiments, the cancer is a hematological cancer, e.g., multiple myeloma. For example, the FcRH5antigen can be present on a tumor, e.g., a tumor of a class typified by having one or more of: limited tumor perfusion, compressed blood vessels, or fibrotic tumor interstitium. In some embodiments, the tumor targeting moiety comprising a FcRH5targeting moiety comprises an anti-FcRH5antibody or antigen-binding fragment thereof described in U.S. Pat. No. 7,999,077 the entire contents of which are incorporated herein by reference.

[1933] In some embodiments of any of the compositions or methods disclosed herein, the cancer is a hematological cancer including, but not limited to: a B-cell or T cell malignancy, e.g., Hodgkin's lymphoma, Non-Hodgkin's lymphoma (e.g., B cell lymphoma, diffuse large B cell lymphoma, follicular lymphoma, chronic lymphocytic leukemia, mantle cell lymphoma, marginal zone B-cell lymphoma, Burkitt lymphoma, lymphoplasmacytic lymphoma, hairy cell leukemia), acute myeloid leukemia (AML), chronic myeloid leukemia, myelodysplastic syndrome, multiple myeloma, and acute lymphocytic leukemia. In some embodiments, the hematological cancer is multiple myeloma.

[1934] In some embodiments, a multispecific molecule disclosed herein further comprises a cytokine molecule, e.g., one or two cytokine molecules. In some embodiments, the cytokine molecule is chosen from interleukin-2 (IL-2), interleukin-7 (IL-7), interleukin-12 (IL-12), interleukin-15 (IL-15), interleukin-18 (IL-18), interleukin-21 (IL-21), or interferon gamma, or a fragment, variant or combination thereof. In some embodiments, is a monomer or a dimer. In some embodiments, the cytokine molecule further comprises a receptor dimerizing domain, e.g., an IL15Ralpha dimerizing domain. In some embodiments, the cytokine molecule (e.g., IL-15) and the receptor dimerizing domain (e.g., an IL15Ralpha dimerizing domain) are not covalently linked, e.g., are non-covalently associated.

[1935] In some embodiments, a multispecific molecule disclosed herein comprises:

[1936] (i) an anti-TCRβV antibody molecule (e.g., an anti-TCRβV antibody molecule as described herein); and

[1937] (ii) a tumor-targeting antibody molecule (e.g., an antibody molecule that binds to a hematological antigen as described herein, e.g., chosen from one or more of BCMA, FcRH5, CD19, CD22, CD33, CD123, FcRH5, CD179a, or CLEC12).

[1938] In some embodiments, the multispecific molecule disclosed herein comprises the anti-TCRβV antibody molecule of (i), the tumor-targeting antibody molecule of (ii) and a cytokine molecule as described herein, e.g., an IL-12 cytokine molecule.

[1939] In some embodiments, the multispecific molecule comprises an anti-TCRβV antibody molecule as described herein; and a tumor-targeting antibody molecule that binds to one or both of BCMA or FcRH5. In some embodiments, the multispecific molecule further comprises an IL-12 cytokine molecule. The multispecific molecule can be used to treat a BCMA- or FcRH5-expressing hematological cancer, e.g., multiple myeloma.

[1940] In some embodiments, the multispecific molecule comprises an anti-TCRβV antibody molecule as described herein; and a tumor-targeting antibody molecule that binds one or more of CD19, CD22, or CD123. In some embodiments, the multispecific molecule further comprises an IL-12 cytokine molecule. The multispecific molecule can be used to treat a CD19−, CD22−, or CD123-expressing hematological cancer, e.g., leukemia or lymphoma. In some embodiments, the CD19−, CD22−, or CD123-expressing hematological cancer is chosen from a B-cell or T cell malignancy, e.g., Hodgkin's lymphoma, Non-Hodgkin's lymphoma (e.g., B cell lymphoma, diffuse large B cell lymphoma, follicular lymphoma, chronic lymphocytic leukemia, mantle cell lymphoma, marginal zone B-cell lymphoma, Burkitt lymphoma, lymphoplasmacytic lymphoma, hairy cell leukemia), acute myeloid leukemia (AML), chronic myeloid leukemia, myelodysplastic syndrome, multiple myeloma, and acute lymphocytic leukemia. In some embodiments, the hematological cancer is multiple myeloma.

[1941] In some embodiments, a multispecific molecule disclosed herein further comprises an immunoglobulin constant region (e.g., Fc region) chosen from the heavy chain constant regions of IgG1, IgG2, and IgG4, more particularly, the heavy chain constant region of human IgG1, IgG2 or IgG4. In some embodiments, the immunoglobulin constant region (e.g., an Fc region) is linked, e.g., covalently linked to, one or more of tumor-targeting moiety, the immune cell engager, the cytokine molecule, or the stromal modifying moiety. In some embodiments, an interface of a first and second immunoglobulin chain constant regions (e.g., Fc region) is altered, e.g., mutated, to increase or decrease dimerization, e.g., relative to a non-engineered interface. In some embodiments, the dimerization of the immunoglobulin chain constant region (e.g., Fc region) is enhanced by providing an Fc interface of a first and a second Fc region with one or more of: a paired cavity-protuberance (“knob-in-a hole”), an electrostatic interaction, or a strand-exchange, such that a greater ratio of heteromultimer:homomultimer forms, e.g., relative to a non-engineered interface. In some embodiments,

[1942] In some embodiments, a multispecific molecule disclosed herein further comprises a linker, e.g., a linker described herein, optionally wherein the linker is selected from: a cleavable linker, a non-cleavable linker, a peptide linker, a flexible linker, a rigid linker, a helical linker, or a non-helical linker.

[1943] In some embodiments, the multispecific molecule comprises at least two non-contiguous polypeptide chains.

[1944] In some embodiments, the multispecific molecule comprises the following configuration:

[1945] A, B-[dimerization module]-C, -D

[1946] wherein:

[1947] (1) the dimerization module comprises an immunoglobulin constant domain, e.g., a heavy chain constant domain (e.g., a homodimeric or heterodimeric heavy chain constant region, e.g., an Fc region), or a constant domain of an immunoglobulin variable region (e.g., a Fab region); and

[1948] (2) A, B, C, and D are independently absent; (i) an antigen binding domain that preferentially binds to a first immune cell engager comprising an anti-TCRβV antibody molecule disclosed herein; (ii) a tumor targeting moiety (e.g., a tumor-targeting antibody molecule as described herein), (iii) a second immune cell engager chosen from a T cell engager, an NK cell engager, a B cell engager, a dendritic cell engager, or a macrophage cell engager; (iv) a cytokine molecule; or (v) a stromal modifying moiety, provided that: at least one, two, or three of A, B, C, and D comprises an antigen binding domain that preferentially binds to a TCRβV region disclosed herein, and any of the remaining A, B, C, and D is absent or comprises one of a tumor targeting moiety, a second immune cell engager, a cytokine molecule, or a stromal modifying moiety.

[1949] In some embodiments, the dimerization module comprises one or more immunoglobulin chain constant regions (e.g., Fc regions) comprising one or more of: a paired cavity-protuberance (“knob-in-a hole”), an electrostatic interaction, or a strand-exchange. In some embodiments, the one or more immunoglobulin chain constant regions (e.g., Fc regions) comprise an amino acid substitution at a position chosen from one or more of 347, 349, 350, 351, 366, 368, 370, 392, 394, 395, 397, 398, 399, 405, 407, or 409, e.g., of the Fc region of human IgG1. In some embodiments, the one or more immunoglobulin chain constant regions (e.g., Fc regions) comprise an amino acid substitution chosen from: T366S, L368A, or Y407V (e.g., corresponding to a cavity or hole), or T366W (e.g., corresponding to a protuberance or knob), or a combination thereof.

[1950] In some embodiments, the multispecific molecule further comprises a linker, e.g., a linker between one or more of: the antigen binding domain of an anti-TCRβV antibody molecule disclosed herein and the tumor targeting moiety; the antigen binding domain of an anti-TCRβV antibody molecule disclosed herein and the second immune cell engager, the antigen binding domain of an anti-TCRβV antibody molecule disclosed herein and the cytokine molecule, the antigen binding domain of an anti-TCRβV antibody molecule disclosed herein and the stromal modifying moiety, the second immune cell engager and the cytokine molecule, the second immune cell engager and the stromal modifying moiety, the cytokine molecule and the stromal modifying moiety, the antigen binding domain of an anti-TCRβV antibody molecule disclosed herein and the dimerization module, the second immune cell engager and the dimerization module, the cytokine molecule and the dimerization module, the stromal modifying moiety and the dimerization module, the tumor targeting moiety and the dimerization module, the tumor targeting moiety and the cytokine molecule, the tumor targeting moiety and the second immune cell engager, or the tumor targeting moiety and the antigen binding domain of an anti-TCRβV antibody molecule disclosed herein. In some embodiments, the linker is chosen from: a cleavable linker, a non-cleavable linker, a peptide linker, a flexible linker, a rigid linker, a helical linker, or a non-helical linker. In some embodiments, the linker is a peptide linker. In some embodiments, the peptide linker comprises Gly and Ser. In some embodiments, the peptide linker comprises an amino acid sequence chosen from SEQ ID NOs: 142-145 or 175-178.

[1951] In some embodiments of a method or composition for use disclosed herein, the disease is a cancer chosen from: a hematological cancer, a solid tumor, a metastatic cancer, soft tissue tumor, metastatic lesion, or a combination thereof.

[1952] In some embodiments of a method or composition for use disclosed herein, the cancer is a solid tumor chosen from: a melanoma, a pancreatic cancer (e.g., pancreatic adenocarcinoma), a breast cancer, a colorectal cancer (CRC), a lung cancer (e.g., small or non-small cell lung cancer), a skin cancer, an ovarian cancer, or a liver cancer. In some embodiments, the cancer is melanoma or CRC.

[1953] In some embodiments of a method or composition for use disclosed herein the cancer is a hematological cancer chosen from: a B-cell or T cell malignancy, e.g., Hodgkin's lymphoma, Non-Hodgkin's lymphoma (e.g., B cell lymphoma, diffuse large B cell lymphoma, follicular lymphoma, chronic lymphocytic leukemia, mantle cell lymphoma, marginal zone B-cell lymphoma, Burkitt lymphoma, lymphoplasmacytic lymphoma, hairy cell leukemia), acute myeloid leukemia (AML), chronic myeloid leukemia, myelodysplastic syndrome, multiple myeloma, or acute lymphocytic leukemia. In some embodiments, the hematological cancer is multiple myeloma. In some embodiments, the hematological cancer is CLL or DLBCL.

[1954] In some embodiments of a method or composition for use disclosed herein the sample from the subject comprises a blood sample, e.g., a peripheral blood sample, a biopsy, e.g., a tumor biopsy, or a bone marrow sample. In some embodiments, the sample comprises a biological sample comprising immune effector cells, e.g., T cells, or NK cells. In some embodiments, T cells comprise a CD4 T cell, a CD8 T cell, (e.g., an effector T cell or a memory T cell (e.g., a memory effector T cell (e.g., TEM cell, e.g., TEMRA cell), or a tumor infiltrating lymphocyte (TIL).

[1955] In some aspects, provided herein is, inter alia, a multispecific molecule (e.g., a bispecific molecule), comprising a first moiety (e.g., a first immune cell engager) comprising an antibody molecule which binds (e.g., specifically binds) to a T cell receptor beta variable region (TCRβV) (“anti-TCRβV antibody molecule”), wherein binding of the first moiety to the TCRβV region results in a cytokine profile that differs from a cytokine profile of a T cell engager that binds to a receptor or molecule other than a TCRβV region (“a non-TCRβV-binding T cell engager”).

[1956] In some embodiments, the multispecific molecule as provided herein comprises a second moiety which comprises one or more of: a tumor-targeting moiety, a cytokine molecule, a stromal modifying moiety, or an anti-TCRβV antibody molecule other than the first moiety.

[1957] In some embodiments, the first moiety comprising the anti-TCRβV antibody molecule comprises an Fc region comprising a variant, e.g., an Fc variant described in Table 21, e.g., an Asn297Ala (N297A) mutation or a Leu234A1a/Leu235Ala (LALA) mutation.

[1958] In some embodiments, the non-TCRβV-binding T cell engager comprises an antibody that binds to a CD3 molecule (e.g., CD3 epsilon (CD3e) molecule); or a TCR alpha (TCRα) molecule.

[1959] In some embodiments, the cytokine profile of the first moiety comprises, one, two, three, four, five, six, seven, or all of the following:

[1960] (i) increased level, e.g., expression level, and/or activity of IL-2;

[1961] (ii) reduced level, e.g., expression level, and/or activity of IL-1β;

[1962] (iii) reduced level, e.g., expression level, and/or activity of IL-6;

[1963] (iv) reduced level, e.g., expression level, and/or activity of TNFα;

[1964] (v) reduced level, e.g., expression level, and/or activity of IL-10;

[1965] (vi) a delay, e.g., at least 1, 2, 3, 4, 5, 6, 7, 8, 9, 10 or more hours delay, in increased level, e.g., expression level, and/or activity of IL-2;

[1966] (vii) a delay, e.g., at least 1, 2, 3, 4, 5, 6, 7, 8, 9, 10 hours delay, in increased level, e.g., expression level, and/or activity of IFNg; or

[1967] (viii) increased level, e.g., expression level, and/or activity of IL-15, e.g., wherein (i)-(viii) are relative to the cytokine profile of the non-TCRβV-binding T cell engager.

[1968] In some embodiments, binding of the first moiety to the TCRβV region results in reduced cytokine storm, e.g., reduced cytokine release syndrome (CRS), as measured by an assay of Example 3, e.g., relative to the cytokine storm induced by the non-TCRβV-binding T cell engager.

[1969] In some embodiments, binding of the first moiety to the TCRβV region results in one, two, three or all of:

[1970] (ix) reduced T cell proliferation kinetics;

[1971] (x) cell killing, e.g., target cell killing, e.g. cancer cell killing, e.g., as measured by an assay of Example 4;

[1972] (xi) increased Natural Killer (NK) cell proliferation, e.g., expansion; or

[1973] (xii) expansion, e.g., at least about 1.1-10 fold expansion (e.g., at least about 1.1, 1.2, 1.3, 1.4, 1.5, 2, 3, 4, 5, 6, 7, 8, 9, or 10 fold expansion), of a population of T cells having a memory-like phenotype,

[1974] e.g., wherein (ix)-(xii) are relative to the non-TCRβV-binding T cell engager.

[1975] In some embodiments, the population of T cells having a memory-like phenotype comprises CD45RA+ CCR7− T cells, e.g., CD4+ and/or CD8+ T cells.

[1976] In some embodiments, the first moiety binds to one or more of a TCRβV subfamily chosen from:

[1977] (i) TCRβ V6 subfamily comprising, e.g., one or more of TCRβ V6-4*01, TCRβ V6-4*02, TCRβ V6-9*01, TCRβ V6-8*01, TCRβ V6-5*01, TCRβ V6-6*02, TCRβ V6-6*01, TCRβ V6-2*01, TCRβ V6-3*01 or TCRβ V6-1*01;

[1978] (ii) TCRβ V10 subfamily comprising, e.g., one or more of TCRβ V10-1*01, TCRβ V10-1*02, TCRβ V10-3*01 or TCRβ V10-2*01;

[1979] (iii) TCRβ V5 subfamily comprising, e.g., one or more of TCRβ V5-6*01, TCRβ V5-4*01, TCRβ V5-1*01 or TCRβ V5-8*01;

[1980] (iv) TCRβ V12 subfamily comprising, e.g., one or more of TCRβ V12-4*01, TCRβ V12-3*01, or TCRβ V12-5*01;

[1981] (v) TCRβ V27 subfamily;

[1982] (vi) TCRβ V28 subfamily;

[1983] (vii) TCRβ V4 subfamily comprising, e.g., one or more of TCRβ V4-1, TCRβ V4-2 or TCRβ V4-3;

[1984] (viii) TCRβ V19 subfamily;

[1985] (ix) TCRβ V9 subfamily; or

[1986] (x) TCRβ V11 subfamily comprising, e.g., TCRβ V11-2.

[1987] In some embodiments, the anti-TCRβV antibody molecule:

[1988] (i) binds specifically to an epitope on TCRβV, e.g., the same or similar epitope as the epitope recognized by an anti-TCRβV antibody molecule as described herein, e.g., a second anti-TCRβV antibody molecule;

[1989] (ii) shows the same or similar binding affinity or specificity, or both, as an anti-TCRβV antibody molecule as described herein, e.g., a second anti-TCRβV antibody molecule;

[1990] (iii) inhibits, e.g., competitively inhibits, the binding of an anti-TCRβV antibody molecule as described herein, e.g., a second anti-TCRβV antibody molecule;

[1991] (vi) binds the same or an overlapping epitope with an anti-TCRβV antibody molecule as described herein, e.g., a second anti-TCRβV antibody molecule; or

[1992] (v) competes for binding, and/or binds the same epitope, with an anti-TCRβV antibody molecule as described herein, e.g., a second anti-TCRβV antibody molecule, wherein the second anti-TCRβV antibody molecule comprises an antigen binding domain comprising a heavy chain complementarity determining region 1 (HC CDR1), a heavy chain complementarity determining region 2 (HC CDR2) and/or a heavy chain complementarity determining region 3 (HC CDR3) of SEQ ID NO: 1 or SEQ ID NO: 9; and/or a light chain complementarity determining region 1 (LC CDR1), a light chain complementarity determining region 2 (LC CDR2), and/or a light chain complementarity determining region 3 (LC CDR3) of SEQ ID NO: 2, SEQ ID NO: 10 or SEQ ID NO: 11.

[1993] In some embodiments, the anti-TCRβV antibody molecule comprises an antigen binding domain comprising:

[1994] (a) a HC CDR1, a HC CDR2 and/or a HC CDR3 of SEQ ID NO: 15, SEQ ID NO: 23, SEQ ID NO: 24 or SEQ ID NO: 25; and/or (b) a LC CDR1, a LC CDR2, and/or a LC CDR3 of SEQ ID NO: 16, SEQ ID NO: 26, SEQ ID NO: 27, SEQ ID NO: 28, SEQ ID NO: 29 or SEQ ID NO:30; or

[1995] (a) a LC CDR1, a LC CDR2 and/or a LC CDR3 of SEQ ID NO: 2, SEQ ID NO: 10 or SEQ ID NO: 11; and/or (b) a HC CDR1, a HC CDR2 and/or a HC CDR2 of SEQ ID NO: 1 or SEQ ID NO: 9.

[1996] In some embodiments, the anti-TCRβV antibody molecule binds the same or different TCRβV subfamily members.

[1997] In some embodiments, the multispecific molecule as provided herein comprises an antibody molecule chosen from a bispecific antibody molecule, a bivalent antibody molecule, or a biparatopic antibody molecule.

[1998] In some embodiments, the multispecific molecule as provided herein comprises a bispecific antibody molecule that binds to two different TCRβV subfamily members.

[1999] In some embodiments, the anti-TCRβV antibody molecule binds:

[2000] one or more of a TCRβ V6 subfamily member and one or more of a TCRβ V10 subfamily member;

[2001] one or more of a TCRβ V6 subfamily member and one or more of a TCRβ V5 subfamily member;

[2002] one or more of a TCRβ V6 subfamily member and one or more of a TCRβ V12 subfamily member;

[2003] one or more of a TCRβ V10 subfamily member and one or more of a TCRβ V5 subfamily member;

[2004] one or more of a TCRβ V10 subfamily member and one or more of a TCRβ V12 subfamily member; or

[2005] one or more of a TCRβ V5 subfamily member and one or more of a TCRβ V12 subfamily member.

[2006] In another aspect, provided herein is a multispecific molecule, e.g., a bispecific molecule, comprising the anti-TCRβV antibody molecule as provided herein.

[2007] In another aspect, provided herein is an antibody molecule which binds, e.g., specifically binds, to a T cell receptor beta variable chain (TCRβV) region, wherein the anti-TCRβV antibody molecule comprises an antigen binding domain comprising:

[2008] (a) a light chain variable region (VL) comprising:

[2009] (i) one, two or all of (e.g., three) a light chain complementarity determining region 1 (LC CDR1), a light chain complementarity determining region 2 (LC CDR2), and a light chain complementarity determining region 3 (LC CDR3) of SEQ ID NO: 10 or SEQ ID NO: 11; and

[2010] (ii) a framework region (FR) having at least 95% identity with one, two, three, or all of (e.g., four) a non-murine germline framework 1 (FR1), a non-murine germline framework region 2 (FR2), a non-murine germline framework region 3 (FR3), and a non-murine germline framework region 4 (FR4); and/or

[2011] (b) a heavy chain variable region (VH) comprising:

[2012] (i) one, two or all of (e.g., three) a heavy chain complementarity determining region 1 (HC CDR1), a heavy chain complementarity determining region 2 (HC CDR2) and a heavy chain complementarity determining region 3 (HC CDR3) of SEQ ID NO: 9; and

[2013] (ii) a framework region (FR) having at least 95% identity with one, two, three, or all of (e.g., four) a non-murine germline framework 1 (FR1), a non-murine germline framework region 2 (FR2), a non-murine germline framework region 3 (FR3), and a non-murine germline framework region 4 (FR4).

[2014] In some embodiments, the VL comprises an amino acid sequence having a consensus sequence of SEQ ID NO: 230.

[2015] In some embodiments, the VH comprises an amino acid sequence having a consensus sequence of SEQ ID NO: 231.

[2016] In some embodiments, the anti-TCRβV antibody molecule as provided herein binds to TCRβ V6, e.g., one or more of TCRβ V6-4*01, TCRβ V6-4*02, TCRβ V6-9*01, TCRβ V6-8*01, TCRβ V6-5*01, TCRβ V6-6*02, TCRβ V6-6*01, TCRβ V6-2*01, TCRβ V6-3*01 or TCRβ V6-1*01, or a variant thereof.

[2017] In some embodiments, the anti-TCRβV antibody molecule comprises an antigen binding domain comprising:

[2018] (i) a HC CDR1, a HC CDR2 and a HC CDR3 of SEQ ID NO: 1 or SEQ ID NO: 9, or an amino acid sequence listed in Table 1; or

[2019] (ii) a LC CDR1, a LC CDR2, and a LC CDR3 of SEQ ID NO: 2, SEQ ID NO: 10 or SEQ ID NO: 11, or an amino acid sequence listed in Table 1.

[2020] In some embodiments, the anti-TCRβV antibody molecule comprises an antigen binding domain comprising a light chain variable region (VL) comprising one, two or all (e.g., three) of a LC CDR1, a LC CDR2 and a LC CDR3 of SEQ ID NO: 2, SEQ ID NO: 10 or SEQ ID NO: 11, or an amino acid sequence listed in Table 1.

[2021] In some embodiments, the anti-TCRβV antibody molecule comprises an antigen binding domain comprising a heavy chain variable region (VH) comprising one, two or all (e.g., three) of a HC CDR1, a HC CDR2 and a HC CDR3 of SEQ ID NO:1 or SEQ ID NO: 9, or an amino acid sequence listed in Table 1.

[2022] In some embodiments, the anti-TCRβV antibody molecule comprises an antigen binding domain comprising:

[2023] (i) a VL comprising: a LC CDR1 amino acid sequence of SEQ ID NO: 6 (or an amino acid sequence with not more than 1, 2, 3 or 4 modifications, e.g., substitutions, additions or deletions thereof), a LC CDR2 amino acid sequence of SEQ ID NO:7 (or an amino acid sequence with not more than 1, 2, 3 or 4 modifications, e.g., substitutions, additions or deletions thereof), and/or a LC CDR3 amino acid sequence of SEQ ID NO:8 (or an amino acid sequence with not more than 1, 2, 3 or 4 modifications, e.g., substitutions, additions or deletions thereof); and/or

[2024] (ii) a VH comprising: a HC CDR1 amino acid sequence of SEQ ID NO: 3 (or an amino acid sequence with not more than 1, 2, 3 or 4 modifications, e.g., substitutions, additions or deletions thereof), a HC CDR2 amino acid sequence of SEQ ID NO:4 (or an amino acid sequence with not more than 1, 2, 3 or 4 modifications, e.g., substitutions, additions or deletions thereof), and/or a HC CDR3 amino acid sequence of SEQ ID NO:5 (or an amino acid sequence with not more than 1, 2, 3 or 4 modifications, e.g., substitutions, additions or deletions thereof).

[2025] In some embodiments, the anti-TCRβV antibody molecule comprises an antigen binding domain comprising:

[2026] a variable heavy chain (VH) of an amino acid sequence listed in Table 1, e.g., SEQ ID NO: 9 or SEQ ID NO: 1312, or a sequence having at least about 85%, 90%, 95%, or 99% sequence identity to an amino acid sequence listed in Table 1, e.g., SEQ ID NO: 9 or SEQ ID NO: 1312; and/or

[2027] a variable light chain (VL) of an amino acid sequence listed in Table 1, e.g., SEQ ID NO: 10 or SEQ ID NO: 11 or SEQ ID NO: 1314, or a sequence having at least about 85%, 90%, 95%, or 99% sequence identity to an amino acid sequence listed in Table 1, e.g., SEQ ID NO: 10 or SEQ ID NO: 11 or SEQ ID NO: 1314.

[2028] In some embodiments, the anti-TCRβV antibody molecule comprises an antigen binding domain comprising:

[2029] (i) the VH amino acid sequence of SEQ ID NO: 9 or SEQ ID NO: 1312;

[2030] (ii) an amino acid sequence having at least about 85%, 90%, 95%, or 99% sequence identity to the amino acid sequence of SEQ ID NO: 9 or SEQ ID NO: 1312;

[2031] (iii) the VL amino acid sequence of SEQ ID NO: 10 or SEQ ID NO: 1314; and/or

[2032] (iv) an amino acid sequence having at least about 85%, 90%, 95%, or 99% sequence identity to the amino acid sequence of SEQ ID NO: 10 or SEQ ID NO: 1314.

[2033] In some embodiments, the anti-TCRβV antibody molecule comprises an antigen binding domain comprising:

[2034] (i) the VH amino acid sequence of SEQ ID NO: 9 or SEQ ID NO: 1312;

[2035] (ii) an amino acid sequence having at least about 85%, 90%, 95%, or 99% sequence identity to the amino acid sequence of SEQ ID NO: 9 or SEQ ID NO: 1312;

[2036] (iii) the VL amino acid sequence of SEQ ID NO: 11 or SEQ ID NO: 1314; and/or

[2037] (iv) an amino acid sequence having at least about 85%, 90%, 95%, or 99% sequence identity to the amino acid sequence of SEQ ID NO: 11 or SEQ ID NO: 1314.

[2038] In some embodiments, the anti-TCRβV antibody molecule comprises a heavy chain comprising a framework region, e.g., framework region 3 (FR3), comprising one or both of:

[2039] (i) a Threonine at position 73, e.g., a substitution at position 73 according to Kabat numbering, e.g., a Glutamic Acid to Threonine substitution; or

[2040] (ii) a Glycine a position 94, e.g., a substitution at position 94 according to Kabat numbering, e.g., a Arginine to Glycine substitution;

[2041] wherein the substitution is relative to a human germline heavy chain framework region sequence.

[2042] In some embodiments, the anti-TCRβV antibody molecule comprises a light chain comprising a framework region, e.g., framework region 1 (FR1), comprising a Phenyalanine at position 10, e.g., a substitution at position 10 according to Kabat numbering, e.g., a Serine to Phenyalanine substitution, wherein the substitution is relative to a human germline light chain framework region sequence.

[2043] In some embodiments, the anti-TCRβV antibody molecule comprises a light chain comprising a framework region, e.g., framework region 2 (FR2), comprising one or both of:

[2044] (i) a Histidine at position 36, e.g., a substitution at position 36 according to Kabat numbering, e.g., a Tyrosine to Histidine substitution; or

[2045] (ii) an Alanine at position 46, e.g., a substitution at position 46 according to Kabat numbering, e.g., a Arginine to Alanine substitution;

[2046] wherein the substitution is relative to a human germline light chain framework region sequence.

[2047] In some embodiments, the anti-TCRβV antibody molecule comprises a light chain comprising a framework region, e.g., framework region 3 (FR3), comprising a Phenyalanine at position 87, e.g., a substitution at position 87 according to Kabat numbering, e.g., a Tyrosine to Phenyalanine substitution, wherein the substitution is relative to a human germline light chain framework region sequence.

[2048] In another aspect, provided herein is an antibody molecule which binds, e.g., specifically binds, to a T cell receptor beta variable chain (TCRβV) region, wherein the anti-TCRβV antibody molecule comprises an antigen binding domain comprising:

[2049] (a) a light chain variable region (VL) comprising:

[2050] (i) one, two or all of (e.g., three) a light chain complementarity determining region 1 (LC CDR1), a light chain complementarity determining region 2 (LC CDR2), and a light chain complementarity determining region 3 (LC CDR3) of a humanized B-H light chain (LC) of Table 2; and

[2051] (ii) a framework region (FR) having at least 95% identity with one, two, three or all (e.g., four) of a framework region 1 (FR1), a framework region 2 (FR2), a framework region 3 (FR3), and a framework region 4 (FR4) of a humanized B-H LC of Table 2; and/or

[2052] (b) a heavy chain variable region (VH) comprising:

[2053] (i) one, two or all of (e.g., three) a heavy chain complementarity determining region 1 (HC CDR1), a heavy chain complementarity determining region 2 (HC CDR2) and a heavy chain complementarity determining region 3 (HC CDR3) of a humanized B-H heavy chain (HC) of Table 2; and

[2054] (ii) a framework region (FR) having at least 95% identity with one, two, three or all (e.g., four) of a framework region 1 (FR1), a framework region 2 (FR2), a framework region 3 (FR3), and a framework region 4 (FR4) of a humanized B-H HC of Table 2.

[2055] In some embodiments, the anti-TCRβV antibody molecule as provided herein binds to TCRβ V12, e.g., TCRβ V12-4*01, TCRβ V12-3*01, or TCRβ V12-5*01, or a variant thereof.

[2056] In some embodiments, the anti-TCRβV antibody molecule comprises an antigen binding domain comprising:

[2057] (i) a HC CDR1, a HC CDR2 and a HC CDR3 of Antibody B-H listed in Table 2; or

[2058] (ii) a LC CDR1, a LC CDR2, and a LC CDR3 of Antibody B-H listed in Table 2.

[2059] In some embodiments, the anti-TCRβV antibody molecule comprises an antigen binding domain comprising a light chain variable region (VL) comprising one, two or all (e.g., three) of a LC CDR1, a LC CDR2 and a LC CDR3 of SEQ ID NO: 2, SEQ ID NO: 10 or SEQ ID NO: 11, or an amino acid sequence listed in Table 1.

[2060] In some embodiments, the anti-TCRβV antibody molecule comprises an antigen binding domain comprising a heavy chain variable region (VH) comprising one, two or all (e.g., three) of a HC CDR1, a HC CDR2 and a HC CDR3 of a humanized Antibody B-H listed in Table 2.

[2061] In some embodiments, the anti-TCRβV antibody molecule comprises an antigen binding domain comprising a light chain variable region (VL) comprising one, two or all (e.g., three) of a LC CDR1, a LC CDR2 and a LC CDR3 of a humanized Antibody B-H listed in Table 2.

[2062] In some embodiments, the anti-TCRβV antibody molecule comprises:

[2063] a VH sequence of a humanized Antibody B-H listed in Table 2, or a sequence having at least about 85%, 90%, 95%, or 99% sequence identity to a VH of a humanized Antibody B-H listed in Table 2; and/or

[2064] a VL sequence of a humanized Antibody B-H listed in Table 2, or a sequence having at least about 85%, 90%, 95%, or 99% sequence identity to a VL of a humanized Antibody B-H listed in Table 2.

[2065] In some embodiments, the anti-TCRβV antibody molecule comprises a framework region (FR) having at least 95% identity with one of: a FR1, a FR2, a FR3, and a FR4 of a humanized B-H LC of Table 2.

[2066] In some embodiments, the anti-TCRβV antibody molecule comprises a framework region (FR) having at least 95% identity with any two of: a FR1, a FR2, a FR3, and a FR4 of a humanized B-H LC of Table 2.

[2067] In some embodiments, the anti-TCRβV antibody molecule comprises a framework region (FR) having at least 95% identity with any three of: a FR1, a FR2, a FR3, and a FR4 of a humanized B-H LC of Table 2.

[2068] In some embodiments, the anti-TCRβV antibody molecule comprises a framework region (FR) having at least 95% identity with all of: a FR1, a FR2, a FR3, and a FR4 of a humanized B-H LC of Table 2.

[2069] In some embodiments, the anti-TCRβV antibody molecule comprises a framework region (FR) having at least 95% identity with one of: a FR1, a FR2, a FR3, and a FR4 of a humanized B-H HC of Table 2.

[2070] In some embodiments, the anti-TCRβV antibody molecule comprises a framework region (FR) having at least 95% identity with any two of: a FR1, a FR2, a FR3, and a FR4 of a humanized B-H HC of Table 2.

[2071] In some embodiments, the anti-TCRβV antibody molecule comprises a framework region (FR) having at least 95% identity with any three of: a FR1, a FR2, a FR3, and a FR4 of a humanized B-H HC of Table 2.

[2072] In some embodiments, the anti-TCRβV antibody molecule comprises a framework region (FR) having at least 95% identity with all of: a FR1, a FR2, a FR3, and a FR4 of a humanized B-H HC of Table 2.

[2073] In some embodiments, binding of the anti-TCRβV antibody molecule to the TCRβV region results in a cytokine profile that differs from a cytokine profile of a T cell engager that binds to a receptor or molecule other than a TCRβV region (“a non-TCRβV-binding T cell engager”).

[2074] In some embodiments, the non-TCRβV-binding T cell engager comprises an antibody that binds to a CD3 molecule (e.g., CD3 epsilon (CD3e) molecule); or a TCR alpha (TCRα) molecule.

[2075] In some embodiments, the cytokine profile of the first moiety comprises, one, two, three, four, five, six, seven, or all of the following:

[2076] (i) increased level, e.g., expression level, and/or activity of IL-2;

[2077] (ii) reduced level, e.g., expression level, and/or activity of IL-1β;

[2078] (iii) reduced level, e.g., expression level, and/or activity of IL-6;

[2079] (iv) reduced level, e.g., expression level, and/or activity of TNFα;

[2080] (v) reduced level, e.g., expression level, and/or activity of IL-10;

[2081] (vi) a delay, e.g., at least 1, 2, 3, 4, 5, 6, 7, 8, 9, 10 or more hours delay, in increased level, e.g., expression level, and/or activity of IL-2;

[2082] (vii) a delay, e.g., at least 1, 2, 3, 4, 5, 6, 7, 8, 9, 10 hours delay, in increased level, e.g., expression level, and/or activity of IFNg; or

[2083] (viii) increased level, e.g., expression level, and/or activity of IL-15, e.g., wherein (i)-(vii) are relative to the cytokine profile of the non-TCRβV-binding T cell engager.

[2084] In some embodiments, binding of the anti-TCRβV antibody molecule to the TCRβV region results in reduced cytokine storm, e.g., reduced cytokine release syndrome (CRS), as measured by an assay of Example 3, e.g., relative to the cytokine storm induced by the non-TCRβV-binding T cell engager.

[2085] In some embodiments, binding of the anti-TCRβV antibody molecule to the TCRβV region results in one, two, three or all of:

[2086] (ix) reduced T cell proliferation kinetics;

[2087] (x) cell killing, e.g., target cell killing, e.g. cancer cell killing, e.g., as measured by an assay of Example 4;

[2088] (xi) increased Natural Killer (NK) cell proliferation, e.g., expansion; or

[2089] (xii) expansion, e.g., at least about 1.1-10 fold expansion (e.g., at least about 1.1, 1.2, 1.3, 1.4, 1.5, 2, 3, 4, 5, 6, 7, 8, 9, or 10 fold expansion), of a population of T cells having a memory-like phenotype,

[2090] e.g., relative to the non-TCRβV-binding T cell engager.

[2091] In some embodiments, the population of T cells having a memory-like phenotype comprises CD45RA+ CCR7− T cells, e.g., CD4+ and/or CD8+ T cells.

[2092] In some embodiments, binding of the anti-TCRβV antibody molecule to a TCRβV region results in a reduction of at least 2, 5, 10, 20, 50, 100, or 200 fold, or at least 2-200 fold (e.g., 5-150, 10-100, 20-50 fold) in the expression level and or activity of IL-10 as measured by an assay of Example 3.

[2093] In some embodiments, binding of the anti-TCRβV antibody molecule to a TCRβV region results in a reduction of at least 2, 5, 10, 20, 50, 100, 200, 300, 400, 500, 600, 700, 800, 900, or 1000 fold, or at least 2-1000 fold (e.g., 5-900, 10-800, 20-700, 50-600, 100-500, or 200-400 fold) in the expression level and or activity of IL-6 as measured by an assay of Example 3.

[2094] In some embodiments, binding of the anti-TCRβV antibody molecule to a TCRβV region results in a reduction of at least 2, 5, 10, 20, 50, 100, 200, 300, 400, 500, 600, 700, 800, 900, 1000, or 2000 fold, or at least 2-2000 fold (e.g., 5-1000, 10-900, 20-800, 50-700, 100-600, 200-500, or 300-400 fold) in the expression level and or activity of TNFα as measured by an assay of Example 3.

[2095] In some embodiments, binding of the anti-TCRβV antibody molecule to a TCRβV region results in an increase of at least 2, 5, 10, 20, 50, 100, 200, 300, 400, 500, 600, 700, 800, 900, 1000, or 2000 fold, or at least 2-2000 fold (e.g., 5-1000, 10-900, 20-800, 50-700, 100-600, 200-500, or 300-400 fold) in the expression level and or activity of IL-2 as measured by an assay of Example 3.

[2096] In some embodiments, the anti-TCRβV antibody molecule comprises an antigen binding domain comprising a single chain Fv (scFv) or a Fab.

[2097] In some embodiments, the anti-TCRβV antibody molecule binds to a conformational or a linear epitope on the T cell.

[2098] In some embodiments, the anti-TCRβV antibody molecule is a full antibody (e.g., an antibody that includes at least one, and preferably two, complete heavy chains, and at least one, and preferably two, complete light chains), or an antigen-binding fragment (e.g., a Fab, F(ab′)2, Fv, a single chain Fv fragment, a single domain antibody, a diabody (dAb), a bivalent antibody, or bispecific antibody or fragment thereof, a single domain variant thereof, or a camelid antibody).

[2099] In some embodiments, the anti-TCRβV antibody molecule comprises one or more heavy chain constant regions chosen from IgG1, IgG2, IgG3, IgGA1, IgGA2, IgG4, IgJ, IgM, IgD, or IgE, or a fragment thereof, e.g., as described in Table 3.

[2100] In some embodiments, the anti-TCRβV antibody molecule comprises a heavy chain constant region of an IgM or a fragment thereof, optionally wherein the IgM heavy chain constant region comprises the sequence of SEQ ID NO: 73, or a sequence with at least 85%, 90%, 95%, or 99% sequence identity thereto.

[2101] In some embodiments, the anti-TCRβV antibody molecule comprises a heavy chain constant region of an IgJ or a fragment thereof, optionally wherein the IgJ heavy chain constant region comprises the sequence of SEQ ID NO: 76 or a sequence with at least 85%, 90%, 95%, or 99% sequence identity thereto.

[2102] In some embodiments, the anti-TCRβV antibody molecule comprises a heavy chain constant region of an IgGA1, or a fragment thereof, optionally wherein the IgGA1 heavy chain constant region comprises the sequence of SEQ ID NO: 74, or a sequence with at least 85%, 90%, 95%, or 99% sequence identity thereto.

[2103] In some embodiments, the anti-TCRβV antibody molecule comprises a heavy chain constant region of an IgGA2, or a fragment thereof, optionally wherein the IgGA2 heavy chain constant region comprises a sequence listed in Table 3, e.g., SEQ ID NO: 75, or a sequence with at least 85%, 90%, 95%, or 99% sequence identity thereto.

[2104] In some embodiments, the anti-TCRβV antibody molecule comprises a light chain constant region chosen from the light chain constant regions of kappa or lambda, or a fragment thereof, e.g., as described in Table 3.

[2105] In some embodiments, the anti-TCRβV antibody molecule comprises a light chain constant region of a kappa chain, or a fragment thereof, optionally wherein the kappa chain constant region comprises the sequence of SEQ ID NO: 39, or a sequence with at least 85%, 90%, 95%, or 99% sequence identity thereto.

[2106] In some embodiments, the anti-TCRβV antibody molecule comprises:

[2107] (i) one or more heavy chain constant regions comprising a heavy chain constant region chosen from IgG1, IgG2, IgG3, IgGA1, IgGA2, IgG4, IgJ, IgM, IgD, or IgE, or a fragment thereof, e.g., as described in Table 3; and

[2108] (ii) a light chain constant region comprising a light chain constant region chosen from the light chain constant regions of kappa or lambda, or a fragment thereof, e.g., as described in Table 3.

[2109] In some embodiments, the anti-TCRβV antibody molecule comprises:

[2110] (i) a heavy chain constant region comprising:

[2111] (a) an IgM heavy chain constant region or a fragment thereof, comprising the sequence of SEQ ID NO: 73, or a sequence with at least 85%, 90%, 95%, or 99% sequence identity thereto;

[2112] (b) an IgGA1 heavy chain constant region or a fragment thereof, comprising the sequence of SEQ ID NO: 74, or a sequence with at least 85%, 90%, 95%, or 99% sequence identity thereto; or

[2113] (c) an IgGA2 heavy chain constant region or a fragment thereof, comprising the sequence of SEQ ID NO: 75, or a sequence with at least 85%, 90%, 95%, or 99% sequence identity thereto; and

[2114] (ii) a light chain constant region comprising a kappa chain constant region comprising the sequence of SEQ ID NO: 39, or a sequence with at least 85%, 90%, 95%, or 99% sequence identity thereto, optionally wherein, the anti-TCRβV antibody molecule further comprises an IgJ heavy chain constant region or a fragment thereof, wherein the IgJ heavy chain constant region comprises the sequence of SEQ ID NO: 76 or a sequence with at least 85%, 90%, 95%, or 99% sequence identity thereto.

[2115] In some embodiments, the second moiety is a tumor-targeting moiety.

[2116] In some embodiments, the second moiety is a cytokine molecule.

[2117] In some embodiments, the second moiety is a stromal modifying moiety.

[2118] In some embodiments, the second moiety is an anti-TCRβV antibody molecule other than the first moiety.

[2119] In some embodiments, the first and/or second moiety binds to and activates an immune cell, e.g., an effector cell.

[2120] In some embodiments, the first and/or second moiety binds to, but does not activate an immune cell, e.g., an effector cell.

[2121] In some embodiments, the second moiety is chosen from an NK cell engager, a T cell engager other than an anti-TCRβV antibody molecule, a B cell engager, a dendritic cell engager, or a macrophage cell engager, or a combination thereof.

[2122] In some embodiments, the tumor-targeting moiety comprises an antibody molecule (e.g., Fab or scFv), a receptor molecule (e.g., a receptor, a receptor fragment or functional variant thereof), or a ligand molecule (e.g., a ligand, a ligand fragment or functional variant thereof), or a combination thereof, that binds to a cancer antigen.

[2123] In some embodiments, the tumor-targeting moiety binds to a cancer antigen present on a cancer, e.g., a hematological cancer, a solid tumor, a metastatic cancer, soft tissue tumor, metastatic lesion, or a combination thereof.

[2124] In some embodiments, the cancer antigen is a tumor antigen or stromal antigen, or a hematological antigen.

[2125] In some embodiments, the cancer antigen is chosen from: BCMA, CD19, CD20, CD22, FcRH5, PDL1, CD47, gangloside 2 (GD2), prostate stem cell antigen (PSCA), prostate specific membrane antigen (PMSA), prostate-specific antigen (PSA), carcinoembryonic antigen (CEA), Ron Kinase, c-Met, Immature laminin receptor, TAG-72, BING-4, Calcium-activated chloride channel 2, Cyclin-B1, 9D7, Ep-CAM, EphA3, Her2/neu, Telomerase, SAP-1, Survivin, NY-ESO-1/LAGE-1, PRAME, SSX-2, Melan-A/MART-1, Gp100/pmel 17, Tyrosinase, TRP-1/-2, MC1R, β-catenin, BRCA1/2, CDK4, CML66, Fibronectin, p53, Ras, TGF-B receptor, AFP, ETA, MAGE, MUC-1, CA-125, BAGE, GAGE, NY-ESO-1, β-catenin, CDK4, CDC27, a actinin-4, TRP1/gp75, TRP2, gp100, Melan-A/MART1, gangliosides, WT1, EphA3, Epidermal growth factor receptor (EGFR), MART-2, MART-1, MUC1, MUC2, MUM1, MUM2, MUM3, NA88-1, NPM, OA1, OGT, RCC, RUI1, RUI2, SAGE, TRG, TRP1, TSTA, Folate receptor alpha, L1-CAM, CAIX, gpA33, GD3, GM2, VEGFR, Integrins (Integrin alphaVbeta3, Integrin alpha5Beta1), Carbohydrates (Le), IGF1R, EPHA3, TRAILR1, TRAILR2, RANKL, (FAP), TGF-beta, hyaluronic acid, collagen, e.g., collagen IV, tenascin C, or tenascin W.

[2126] In some embodiments, the tumor-targeting moiety is a BCMA targeting moiety or a FcRH5 targeting moiety.

[2127] In some embodiments, the cancer is a solid tumor including but not limited to: pancreatic (e.g., pancreatic adenocarcinoma) cancer, breast cancer, colorectal cancer, lung cancer (e.g., small or non-small cell lung cancer), skin cancer, ovarian cancer, or liver cancer.

[2128] In some embodiments, the cancer is a hematological cancer including, but not limited to: a B-cell or T cell malignancy, e.g., Hodgkin's lymphoma, Non-Hodgkin's lymphoma (e.g., B cell lymphoma, diffuse large B cell lymphoma, follicular lymphoma, chronic lymphocytic leukemia, mantle cell lymphoma, marginal zone B-cell lymphoma, Burkitt lymphoma, lymphoplasmacytic lymphoma, hairy cell leukemia), acute myeloid leukemia (AML), chronic myeloid leukemia, myelodysplastic syndrome, multiple myeloma, and acute lymphocytic leukemia.

[2129] In some embodiments, the cytokine molecule is chosen from interleukin-2 (IL-2), interleukin-7 (IL-7), interleukin-12 (IL-12), interleukin-15 (IL-15), interleukin-18 (IL-18), interleukin-21 (IL-21), or interferon gamma, or a fragment, variant or combination thereof.

[2130] In some embodiments, the cytokine molecule is a monomer or a dimer.

[2131] In some embodiments, the cytokine molecule further comprises a receptor dimerizing domain, e.g., an IL15Ralpha dimerizing domain.

[2132] In some embodiments, the cytokine molecule (e.g., IL-15) and the receptor dimerizing domain (e.g., an IL15Ralpha dimerizing domain) are not covalently linked, e.g., are non-covalently associated.

[2133] In some embodiments, the multispecific molecule as provided herein further comprises an immunoglobulin constant region (e.g., Fc region) chosen from the heavy chain constant regions of IgG1, IgG2, IgG3, IgGA1, IgGA2, IgG4, IgJ, IgM, IgD, or IgE, or a fragment thereof, optionally wherein, the heavy chain constant region comprises the heavy chain constant region of human IgG1, IgG2 or IgG4.

[2134] In some embodiments, the immunoglobulin constant region (e.g., an Fc region) is linked, e.g., covalently linked to, one or more of tumor-targeting moiety, the cytokine molecule, or the stromal modifying moiety.

[2135] In some embodiments, an interface of a first and second immunoglobulin chain constant regions (e.g., Fc region) is altered, e.g., mutated, to increase or decrease dimerization, e.g., relative to a non-engineered interface.

[2136] In some embodiments, the dimerization of the immunoglobulin chain constant region (e.g., Fc region) is enhanced by providing an Fc interface of a first and a second Fc region with one or more of: a paired cavity-protuberance (“knob-in-a hole”), an electrostatic interaction, or a strand-exchange, such that a greater ratio of heteromultimer:homomultimer forms, e.g., relative to a non-engineered interface.

[2137] In some embodiments, the multispecific molecule as provided herein further comprises a linker, e.g., a linker described herein, optionally wherein the linker is selected from: a cleavable linker, a non-cleavable linker, a peptide linker, a flexible linker, a rigid linker, a helical linker, or a non-helical linker.

[2138] In another aspect, provided herein is an isolated nucleic acid molecule comprising a nucleotide sequence encoding the anti-TCRβV antibody molecule as provided herein, or a nucleotide sequence having at least 75%, 80%, 85%, 90%, 95%, or 99% identity thereto.

[2139] In another aspect, provided herein is an isolated nucleic acid molecule comprising a nucleotide sequence encoding the multispecific molecule as provided herein, or a nucleotide sequence having at least 75%, 80%, 85%, 90%, 95%, or 99% identity thereto.

[2140] In another aspect, provided herein is a vector, e.g., an expression vector, comprising one or more of the nucleic acid molecules as provided herein.

[2141] In another aspect, provided herein is a cell, e.g., host cell, comprising the nucleic acid molecule as provided herein, or the vector as provided herein.

[2142] In another aspect, provided herein is a method of making, e.g., producing or manufacturing, the anti-TCRβV antibody molecule as provided herein, or the multispecific molecule as provided herein, comprising culturing the host cell as provided herein, under suitable conditions, e.g., conditions suitable expression of the anti-TCRβV antibody molecule or the multispecific molecule.

[2143] In another aspect, provided herein is a pharmaceutical composition comprising the anti-TCRβV antibody molecule as provided herein, or the multispecific molecule as provided herein, and a pharmaceutically acceptable carrier, excipient, or stabilizer.

[2144] In another aspect, provided herein is a method of modulating, e.g., enhancing, an immune response in a subject comprising administering to the subject an effective amount of an antibody molecule which binds (e.g., specifically binds) to a T cell receptor beta variable region (TCRβV) (“anti-TCRβV antibody molecule”).

[2145] In another aspect, provided herein is a method of modulating, e.g., enhancing, an immune response in a subject comprising administering to the subject an effective amount of the multispecific molecule as provided herein.

[2146] In some embodiments, the method comprises expanding, e.g., increasing the number of, an immune cell population in the subject.

[2147] In another aspect, provided herein is a method of expanding, e.g., increasing the number of, an immune cell population comprising, contacting the immune cell population with an effective amount of an antibody molecule which binds (e.g., specifically binds) to a T cell receptor beta variable region (TCRβV) (“anti-TCRβV antibody molecule”).

[2148] In another aspect, provided herein is a method of expanding, e.g., increasing the number of, an immune cell population comprising, contacting the immune cell population with an effective amount of the multispecific molecule as provided herein.

[2149] In some embodiments, the expansion occurs in vivo or ex vivo (e.g., in vitro).

[2150] In some embodiments, the immune cell population comprises a TCRβV expressing cell, e.g., a TCRβV+ cell.

[2151] In some embodiments, the TCRβV expressing cell is a T cell, e.g., a CD8+ T cell, a CD3+ T cell or a CD4+ T cell.

[2152] In some embodiments, the immune cell population comprises a T cell (e.g., a CD4 T cell, a CD8 T cell (e.g., an effector T cell, a T cell having a memory-like phenotype or a memory T cell (e.g., a memory effector T cell (e.g., TEM cell, e.g., TEMRA cell), or a tumor infiltrating lymphocyte (TIL).

[2153] In some embodiments, the immune cell population comprises a T cell, a Natural Killer cell, a B cell, or a myeloid cell.

[2154] In some embodiments, the immune cell population is obtained from a healthy subject.

[2155] In some embodiments, the immune cell population is obtained from a subject (e.g., from an apheresis sample from the subject) having a disease, e.g., a cancer, e.g., as described herein, optionally wherein the immune cell population comprises a tumor infiltrating lymphocyte (TIL).

[2156] In some embodiments, the method results in an expansion of at least 1.1-10 fold (e.g., at least 1.1, 1.2, 1.3, 1.4, 1.5, 2, 3, 4, 5, 6, 7, 8, 9, or 10 fold expansion).

[2157] In some embodiments, the method as provided herein further comprises contacting the population of cells with an agent that promotes, e.g., increases, immune cell expansion.

[2158] In some embodiments, the method as provided herein further comprises contacting the population of cells with an immune checkpoint inhibitor, e.g., a PD-1 inhibitor.

[2159] In some embodiments, the method as provided herein further comprises contacting the population of cells with a 4-1BB (CD127) agonist, e.g., an anti-4-1BB antibody.

[2160] In some embodiments, the method as provided herein further comprises contacting the population of cells with a non-dividing population of cells, e.g., feeder cells, e.g., irradiated allogenic human PBMCs.

[2161] In some embodiments, the population of cells is expanded in an appropriate media (e.g., media described herein) that includes one or more cytokines, e.g., IL-2, IL-7, IL-15, or a combination thereof.

[2162] In some embodiments, the population of cells is expanded for a period of at least about 4 hours, 6 hours, 10 hours, 12 hours, 15 hours, 18 hours, 20 hours, or 22 hours, or for at least 1, 2, 3, 4, 5, 6, 7, 8, 9, 10, 11, 12, 13, 14, 15, 1, 6 17, 18, 19, 20 or 21 days, or for at least about 1 week, 2 weeks, 3 weeks, 4 weeks, 5 weeks, 6 weeks, 7 weeks or 8 weeks.

[2163] In some embodiments, expansion of the population of immune cells, is compared to expansion of a similar population of cells with an antibody that binds to: a CD3 molecule, e.g., CD3 epsilon (CD3e) molecule; or a TCR alpha (TCRα) molecule.

[2164] In some embodiments, expansion of the population of immune cells, is compared to expansion of a similar population of cells not contacted with the anti-TCRβV antibody molecule, or multispecific molecule comprising the anti-TCRβV antibody molecule.

[2165] In some embodiments, expansion of the population of T cells having a memory-like phenotype, e.g., CD45RA+ CCR7− cells (e.g., memory effector T cells, e.g., TEM cells, e.g., TEMRA cells), is compared to expansion of a similar population of cells with an antibody that binds to: a CD3 molecule, e.g., CD3 epsilon (CD3e) molecule; or a TCR alpha (TCRα) molecule.

[2166] In some embodiments, the population of expanded T cells having a memory-like phenotype, e.g., effector memory cells, comprises cells which:

[2167] (i) have a detectable level of CD45RA, e.g., express or re-express CD45RA;

[2168] (ii) have low or no expression of CCR7; and/or

[2169] (iii) have a detectable level of CD95, e.g., express CD95,

[2170] e.g., a population of CD45RA+, CCR7−, CD95+ T cells, optionally wherein the T cells comprise CD3+, CD4+ or CD8+ T cells.

[2171] In some embodiments, the method results in expansion of, e.g., selective or preferential expansion of, T cells expressing a T cell receptor (TCR) comprising a TCR alpha and/or TCR beta molecule, e.g., TCR alpha-beta T cells (αβ T cells).

[2172] In some embodiments, the method results in expansion of αβT cells over expansion of T cells expressing a TCR comprising a TCR gamma and/or TCR delta molecule, e.g., TCR gamma-delta T cells (γδ T cells).

[2173] In another aspect, provided herein is a method of treating a disease, e.g., cancer, in a subject comprising administering to the subject an effective amount of an antibody molecule which binds (e.g., specifically binds) to a T cell receptor beta variable region (TCRβV) (“anti-TCRβV antibody molecule”), thereby treating the cancer.

[2174] In another aspect, provided herein is a composition comprising an antibody molecule which binds (e.g., specifically binds) to a T cell receptor beta variable region (TCRβV) (“anti-TCRβV antibody molecule”), for use in treating a disease, e.g., cancer, in a subject.

[2175] In another aspect, provided herein is a composition comprising an antibody molecule which binds (e.g., specifically binds) to a T cell receptor beta variable region (TCRβV) (“anti-TCRβV antibody molecule”), for use in the manufacture of a medicament for treating a disease, e.g., cancer, in a subject.

[2176] In another aspect, provided herein is a method of treating a disease, e.g., cancer, in a subject comprising administering to the subject an effective amount of the multispecific molecule as provided herein, thereby treating the cancer.

[2177] In another aspect, provided herein is a composition comprising the multispecific molecule as provided herein, for use in treating a disease, e.g., cancer, in a subject.

[2178] In another aspect, provided herein is a composition comprising the multispecific molecule as provided herein, for use in the manufacture of a medicament for treating a disease, e.g., cancer, in a subject.

[2179] In another aspect, provided herein is a method of treating, e.g., preventing or reducing, cytokine release syndrome (CRS) and/or neurotoxicity (NT) in a subject, e.g., CRS and/or NT associated with a treatment, e.g., a previously administered treatment, comprising administering to the subject an effective amount of an antibody molecule which binds (e.g., specifically binds) to a T cell receptor beta variable region (TCRβV) (“anti-TCRβV antibody molecule”), thereby preventing CRS and/or NT in the subject.

[2180] In another aspect, provided herein is a method of treating, e.g., preventing or reducing, cytokine release syndrome (CRS) and/or neurotoxicity (NT) in a subject, e.g., CRS and/or NT associated with a treatment, e.g., a previously administered treatment, comprising administering to the subject an effective amount the multispecific molecule as provided herein, thereby preventing CRS and/or NT in the subject.

[2181] In another aspect, provided herein is a method of targeting a therapy, e.g., treatment, to a T cell in a subject having a disease, e.g., cancer, comprising administering an effective amount of:

[2182] (i) an antibody molecule which binds (e.g., specifically binds) to a T cell receptor beta variable region (TCRβV) (“anti-TCRβV antibody molecule”); and

[2183] (ii) the therapy, e.g., a tumor targeting therapy (e.g., an antibody that binds to a cancer antigen),

[2184] e.g., as described herein, thereby targeting the therapy to the T cell in the subject.

[2185] In another aspect, provided herein is a method of targeting a therapy, e.g., treatment, to a T cell in a subject having a disease, e.g., cancer, comprising administering an effective amount of:

[2186] (i) the multispecific molecule as provided herein; and

[2187] (ii) the therapy, e.g., a tumor targeting therapy (e.g., an antibody that binds to a cancer antigen), e.g., as described herein,

[2188] thereby targeting the therapy to the T cell in the subject.

[2189] In some embodiments, the method results in: reduced cytokine release syndrome (CRS) (e.g., lesser duration of CRS or no CRS), or a reduced severity of CRS (e.g., absence of severe CRS, e.g., CRS grade 4 or 5) compared to administration of (ii) alone.

[2190] In some embodiments, the anti-TCRβV antibody or the multispecific molecule is administered concurrently with or after the administration of the treatment associated with CRS.

[2191] In another aspect, provided herein is a method of treating a subject having a cancer, the method comprising:

[2192] acquiring a value of the status of a TCRβV subfamily for the subject, wherein said value comprises a measure of the presence of, e.g., level or activity of, a TCRβV molecule in a sample from the subject, and

[2193] administering an effective amount of an antibody molecule which binds (e.g., specifically binds) to a T cell receptor beta variable region (TCRβV) (“anti-TCRβV antibody molecule”); to the subject, thereby treating the subject.

[2194] In another aspect, provided herein is a method of treating a subject having a cancer, the method comprising:

[2195] acquiring a value of the status of a TCRβV subfamily for the subject, wherein said value comprises a measure of the presence of, e.g., level or activity of, a TCRβV molecule in a sample from the subject, and

[2196] administering an effective amount of the multispecific molecule as provided herein to the subject, thereby treating the subject.

[2197] In another aspect, provided herein is a method of treating a subject having a cancer, the method comprising administering an effective amount of an antibody molecule which binds (e.g., specifically binds) to a T cell receptor beta variable region (TCRβV) (“anti-TCRβV antibody molecule”) to the subject, wherein the subject has a higher, e.g., increased, level or activity of one or more TCRβV subfamilies, e.g., as described herein, compared to a reference level or activity of one or more TCRβV subfamilies, e.g., in a healthy subject, e.g., a subject not having a cancer.

[2198] In another aspect, provided herein is a method of treating a subject having a cancer, the method comprising administering an effective amount of the multispecific molecule as provided herein to the subject, wherein the subject has a higher, e.g., increased, level or activity of one or more TCRβV subfamilies, e.g., as described herein, compared to a reference level or activity of one or more TCRβV subfamilies, e.g., in a healthy subject, e.g., a subject not having a cancer.

[2199] In another aspect, provided herein is a method of expanding a population of immune effector cells from a subject having a cancer, the method comprising:

[2200] (i) isolating a biological sample comprising a population of immune effector cells from the subject; e.g., a peripheral blood sample, biopsy sample, or bone marrow sample;

[2201] (ii) acquiring a value of the status of one or more TCRβV subfamilies for the subject, e.g., in the biological sample from the subject, wherein said value comprises a measure of the presence of, e.g., level or activity of, a TCRβV subfamily in a sample from the subject compared to a reference value, e.g., a sample from a health subject, wherein a value that is higher, e.g., increased, in the subject relative to the reference, e.g., healthy subject, is indicative of the presence of cancer in the subject, and

[2202] (iii) contacting the biological sample comprising a population of immune effector cells with an anti-TCRβV antibody molecule, e.g., as described herein.

[2203] In some embodiments, the method as provided herein further comprises administering the population of immune effector cells contacted with the anti-TCRβV antibody molecule to the subject.

[2204] In another aspect, provided herein is a method of expanding a population of immune effector cells from a subject having a cancer, the method comprising:

[2205] (i) isolating a biological sample comprising a population of immune effector cells from the subject; e.g., a peripheral blood sample, biopsy sample, or bone marrow sample;

[2206] (ii) acquiring a value of the status of one or more TCRβV subfamilies for the subject, e.g., in the biological sample from the subject, wherein said value comprises a measure of the presence of, e.g., level or activity of, a TCRβV subfamily in a sample from the subject compared to a reference value, e.g., a sample from a health subject, wherein a value that is higher, e.g., increased, in the subject relative to the reference, e.g., healthy subject, is indicative of the presence of cancer in the subject, and

[2207] (iii) contacting the biological sample comprising a population of immune effector cells with the multispecific molecule as provided herein.

[2208] In some embodiments, the method as provided herein further comprises administering the population of immune effector cells contacted with the multispecific molecule to the subject.

[2209] In some embodiments, the method as provided herein comprises measuring T cell function (e.g., cytotoxic activity, cytokine secretion, or degranulation) in the population of immune effector cells, e.g., compared to a reference population, e.g., an otherwise similar population not contacted with the anti-TCRβV antibody molecule or a population of immune effector cells obtained from a healthy subject (e.g., a subject that does not have a cancer).

[2210] In some embodiments, the biological sample comprising the population of immune effector cells is contacted with an anti-TCRβV antibody molecule or a multispecific molecule that binds to the one or more TCRβV subfamilies (e.g., the same TCRβV subfamily) identified as being higher, e.g., increased, in the biological sample.

[2211] In some embodiments, the biological sample comprising the population of immune effector cells is contacted with an anti-TCRβV antibody molecule or a multispecific molecule that does not bind to the one or more TCRβV subfamilies (e.g., a different TCRβV subfamily) identified as being higher, e.g., increased, in the biological sample.

[2212] In some embodiments, the cancer is a solid tumor including but not limited to: melanoma, pancreatic (e.g., pancreatic adenocarcinoma) cancer, breast cancer, colorectal cancer (CRC), lung cancer (e.g., small or non-small cell lung cancer), skin cancer, ovarian cancer, or liver cancer.

[2213] In some embodiments, the cancer is a hematological cancer including, but not limited to: a B-cell or T cell malignancy, e.g., Hodgkin's lymphoma, Non-Hodgkin's lymphoma (e.g., B cell lymphoma, diffuse large B cell lymphoma (DLBCL), follicular lymphoma, chronic lymphocytic leukemia (B-CLL), mantle cell lymphoma, marginal zone B-cell lymphoma, Burkitt lymphoma, lymphoplasmacytic lymphoma, hairy cell leukemia), acute myeloid leukemia (AML), chronic myeloid leukemia, myelodysplastic syndrome, multiple myeloma, and acute lymphocytic leukemia.

[2214] In some embodiments, the cancer is B-CLL and the TCRβV molecule comprises:

[2215] (i) TCRβ V6 subfamily comprising, e.g., TCRβ V6-4*01, TCRβ V6-4*02, TCRβ V6-9*01, TCRβ V6-8*01, TCRβ V6-5*01, TCRβ V6-6*02, TCRβ V6-6*01, TCRβ V6-2*01, TCRβ V6-3*01 or TCRβ V6-1*01;

[2216] (ii) TCRβ V5 subfamily comprising TCRβ V5-6*01, TCRβ V5-4*01, or TCRβ V5-8*01; (iii) TCRβ V3 subfamily comprising TCRβ V3-1*01;

[2217] (iv) TCRβ V2 subfamily comprising TCRβ V2*01; or

[2218] (v) TCRβ V19 subfamily comprising TCRβ V19*01, or TCRβ V19*02.

[2219] In some embodiments, the cancer is melanoma and the TCRβV molecule comprises the TCRβ V6 subfamily comprising, e.g., TCRβ V6-4*01, TCRβ V6-4*02, TCRβ V6-9*01, TCRβ V6-8*01, TCRβ V6-5*01, TCRβ V6-6*02, TCRβ V6-6*01, TCRβ V6-2*01, TCRβ V6-3*01 or TCRβ V6-1*01.

[2220] In some embodiments, the cancer is DLBCL and the TCRβV molecule comprises:

[2221] (i) TCRβ V13 subfamily comprising TCRβ V13*01;

[2222] (ii) TCRβ V3 subfamily comprising TCRβ V3-1*01; or

[2223] (iii) TCRβ V23 subfamily.

[2224] In some embodiments, the cancer is CRC and the TCRβV molecule comprises:

[2225] (i) TCRβ V19 subfamily comprising TCRβ V19*01, or TCRβ V19*02

[2226] (ii) TCRβ V12 subfamily comprising TCRβ V12-4*01, TCRβ V12-3*01, or TCRβ V12-5*01

[2227] (iii) TCRβ V16 subfamily comprising TCRβ V16*01; or

[2228] (iv) TCRβ V21 subfamily.

[2229] In some embodiments, the tumor comprises an antigen, e.g., a tumor antigen, e.g., a tumor associated antigen or a neoantigen; and/or the one or more TCRβV subfamilies recognize, e.g., bind to, the tumor antigen.

[2230] In some embodiments, the sample comprises a blood sample, e.g., a peripheral blood sample, a biopsy, e.g., a tumor biopsy, or a bone marrow sample.

[2231] In some embodiments, the sample comprises a biological sample comprising immune cells, e.g., TCRBV expressing cells (e.g., TCRBV+ cells), T cells, or NK cells.

[2232] In some embodiments, the T cells comprise a CD4 T cell, a CD8 T cell, (e.g., an effector T cell or a memory T cell (e.g., a memory effector T cell (e.g., TEM cell, e.g., TEMRA cell), or a tumor infiltrating lymphocyte (TIL).

[2233] In some embodiments, the method results in an expansion, e.g., in vivo or ex vivo expansion, of at least 1.1-1000 fold, e.g., 1.1-10, 10-100, 100-200, 200-300, 300-400, 400-500, 500-600, 600-700, 700-800, 800-900, or 900-1000 fold expansion of an immune effector cell population comprising a TCRVB expressing immune effector cell, e.g., T cell.

[2234] In some embodiments, the population of cells is expanded in an appropriate media (e.g., media described herein) that includes one or more cytokines, e.g., IL-2, IL-7, IL-15, or a combination thereof.

[2235] In some embodiments, the population of cells is expanded for a period of at least about 4 hours, 6 hours, 10 hours, 12 hours, 15 hours, 18 hours, 20 hours, or 22 hours, or for at least 1, 2, 3, 4, 5, 6, 7, 8, 9, 10, 11, 12, 13, 14, 15, 1, 6 17, 18, 19, 20 or 21 days, or for at least about 1 week, 2 weeks, 3 weeks, 4 weeks, 5 weeks, 6 weeks, 7 weeks or 8 weeks.

[2236] In some embodiments, expansion of the population of immune cells, is compared to expansion of a similar population of cells with an antibody that binds to: a CD3 molecule, e.g., CD3 epsilon (CD3e) molecule; or a TCR alpha (TCRα) molecule.

[2237] In some embodiments, expansion of the population of immune cells, is compared to expansion of a similar population of cells not contacted with the anti-TCRβV antibody molecule.

[2238] In some embodiments, expansion of the population of T cells having a memory-like phenotype, e.g., memory effector T cells, e.g., TEM cells, e.g., TEMRA cells, is compared to expansion of a similar population of cells with an antibody that binds to: a CD3 molecule, e.g., CD3 epsilon (CD3e) molecule; or a TCR alpha (TCRα) molecule.

[2239] In some embodiments, the population of expanded T cells having a memory-like phenotype, e.g., effector memory cells, comprises cells which:

[2240] (i) have a detectable level of CD45RA, e.g., express or re-express CD45RA;

[2241] (ii) have low or no expression of CCR7; and/or

[2242] (iii) have a detectable level of CD95, e.g., express CD95,

[2243] e.g., a population of CD45RA+, CCR7−, CD95+ T cells, optionally wherein the T cells comprise CD3+, CD4+ or CD8+ T cells.

[2244] In some embodiments, the method results in expansion of, e.g., selective or preferential expansion of, T cells expressing a T cell receptor (TCR) comprising a TCR alpha and/or TCR beta molecule, e.g., TCR alpha-beta T cells (αβ T cells).

[2245] In some embodiments, the method results in expansion of αβT cells over expansion of T cells expressing a TCR comprising a TCR gamma and/or TCR delta molecule, e.g., TCR gamma-delta T cells (γδ T cells).

[2246] In some embodiments, the anti-TCRβV antibody molecule comprises an antigen binding domain comprising a light chain variable region (VL) comprising one, two or all of a LC CDR1, a LC CDR2 and a LC CDR3 of a VL disclosed in Tables 1, 2, 10, 11, 12 or 13, e.g., SEQ ID NO: 1314, SEQ ID NO: 2, SEQ ID NO: 10, SEQ ID NO: 11, SEQ ID NO: 16, SEQ ID NO: 26, SEQ ID NO: 27, SEQ ID NO: 28, SEQ ID NO: 29 or SEQ ID NO:30

[2247] In some embodiments, the anti-TCRβV antibody molecule comprises an antigen binding domain comprising a heavy chain variable region (VH) comprising one, two or all of a HC CDR1, a HC CDR2 and a HC CDR3 of a VH disclosed in Tables 1, 2, 10, 11, 12 or 13, e.g., SEQ ID NO: 1312, SEQ ID NO:1, SEQ ID NO: 9, SEQ ID NO: 15, SEQ ID NO: 23, SEQ ID NO: 24 or SEQ ID NO: 25.

[2248] In some embodiments, the anti-TCRβV antibody molecule comprises an antigen binding domain comprising:

[2249] (i) a VL comprising: a LC CDR1 amino acid sequence of SEQ ID NO: 20 (or an amino acid sequence with not more than 1, 2, 3 or 4 modifications, e.g., substitutions, additions or deletions thereof), a LC CDR2 amino acid sequence of SEQ ID NO:21 (or an amino acid sequence with not more than 1, 2, 3 or 4 modifications, e.g., substitutions, additions or deletions thereof), and/or a LC CDR3 amino acid sequence of SEQ ID NO:22 (or an amino acid sequence with not more than 1, 2, 3 or 4 modifications, e.g., substitutions, additions or deletions thereof); and/or

[2250] (ii) a VH comprising: a HC CDR1 amino acid sequence of SEQ ID NO: 17 (or an amino acid sequence with not more than 1, 2, 3 or 4 modifications, e.g., substitutions, additions or deletions thereof), a HC CDR2 amino acid sequence of SEQ ID NO:18 (or an amino acid sequence with not more than 1, 2, 3 or 4 modifications, e.g., substitutions, additions or deletions thereof), and/or a HC CDR3 amino acid sequence of SEQ ID NO:19 (or an amino acid sequence with not more than 1, 2, 3 or 4 modifications, e.g., substitutions, additions or deletions thereof).

[2251] In some embodiments, the anti-TCRβV antibody molecule comprises an antigen binding domain comprising:

[2252] a variable heavy chain (VH) of SEQ ID NO: 23, SEQ ID NO: 24 or SEQ ID NO: 25, or a sequence having at least about 85%, 90%, 95%, or 99% sequence identity thereto; and/or a variable light chain (VL) of SEQ ID NO: 26, SEQ ID NO: 27, SEQ ID NO: 28, SEQ ID NO: 29 or SEQ ID NO:30, or a sequence having at least about 85%, 90%, 95%, or 99% sequence identity thereto.

[2253] In some embodiments, the anti-TCRβV antibody molecule comprises an antigen binding domain comprising

[2254] (i) a VL comprising: a LC CDR1 amino acid sequence of SEQ ID NO: 6 (or an amino acid sequence with not more than 1, 2, 3 or 4 modifications, e.g., substitutions, additions or deletions thereof), a LC CDR2 amino acid sequence of SEQ ID NO:7 (or an amino acid sequence with not more than 1, 2, 3 or 4 modifications, e.g., substitutions, additions or deletions thereof), and/or a LC CDR3 amino acid sequence of SEQ ID NO: 8 (or an amino acid sequence with not more than 1, 2, 3 or 4 modifications, e.g., substitutions, additions or deletions thereof); and/or

[2255] (ii) a VH comprising: a HC CDR1 amino acid sequence of SEQ ID NO: 3 (or an amino acid sequence with not more than 1, 2, 3 or 4 modifications, e.g., substitutions, additions or deletions thereof), a HC CDR2 amino acid sequence of SEQ ID NO:4 (or an amino acid sequence with not more than 1, 2, 3 or 4 modifications, e.g., substitutions, additions or deletions thereof), and/or a HC CDR3 amino acid sequence of SEQ ID NO:5 (or an amino acid sequence with not more than 1, 2, 3 or 4 modifications, e.g., substitutions, additions or deletions thereof).

[2256] In some embodiments, the anti-TCRβV antibody molecule comprises an antigen binding domain comprising:

[2257] a variable heavy chain (VH) of SEQ ID NO: 1 or SEQ ID NO: 9 or SEQ ID NO: 1312, or a sequence having at least about 85%, 90%, 95%, or 99% sequence identity thereto; and/or a variable light chain (VL) of SEQ ID NO: 2, SEQ ID NO: 10 or SEQ ID NO:11 or SEQ ID NO: 1314, or a sequence having at least about 85%, 90%, 95%, or 99% sequence identity thereto.

[2258] In some embodiments, the anti-TCRβV antibody molecule comprises a light chain comprising a framework region, e.g., framework region 1 (FR1), comprising one, two or all (e.g., three) of:

[2259] (i) an Aspartic Acid at position 1, e.g., a substitution at position 1 according to Kabat numbering, e.g., a Alanine to Aspartic Acid substitution; or

[2260] (ii) an Asparagine at position 2, e.g., a substitution at position 2 according to Kabat numbering, e.g., a Isoleucine to Asparagine, a Serine to Asparagine, or a Tyrosine to Asparagine substitution; or

[2261] (iii) a Leucine at position 4, e.g., a substitution at position 4 according to Kabat numbering, e.g., a Methionine to Leucine substitution, wherein the substitution is relative to a human germline light chain framework region sequence.

[2262] In some embodiments, the anti-TCRβV antibody molecule comprises a light chain comprising a framework region, e.g., framework region 3 (FR3), comprising one, two or all (e.g., three) of:

[2263] (i) a Glycine at position 66, e.g., a substitution at position 66 according to Kabat numbering, e.g., a Lysine to Glycine, or a Serine to Glycine substitution; or

[2264] (ii) an Asparagine at position 69, e.g., a substitution at position 69 according to Kabat numbering, e.g., a Threonine to Asparagine substitution; or

[2265] (iii) a Tyrosine at position 71, e.g., a substitution at position 71 according to Kabat numbering, e.g., a Phenylalanine to Tyrosine, or Alanine to Tyrosine substitution,

[2266] wherein the substitution is relative to a human germline light chain framework region sequence.

[2267] In some embodiments, binding of the anti-TCRβV antibody molecule to the TCRβV region results in a cytokine profile that differs from a cytokine profile of a T cell engager that binds to a receptor or molecule other than a TCRβV region (“a non-TCRβV-binding T cell engager”).

[2268] In some embodiments, the non-TCRβV-binding T cell engager comprises an antibody that binds to a CD3 molecule (e.g., CD3 epsilon (CD3e) molecule); or a TCR alpha (TCRα) molecule.

[2269] In some embodiments, the cytokine profile of the first moiety comprises, one, two, three, four, five, six, seven, or all of the following:

[2270] (i) increased level, e.g., expression level, and/or activity of IL-2;

[2271] (ii) reduced level, e.g., expression level, and/or activity of IL-1β;

[2272] (iii) reduced level, e.g., expression level, and/or activity of IL-6;

[2273] (iv) reduced level, e.g., expression level, and/or activity of TNFα;

[2274] (v) reduced level, e.g., expression level, and/or activity of IL-10;

[2275] (vi) a delay, e.g., at least 1, 2, 3, 4, 5, 6, 7, 8, 9, 10 or more hours delay, in increased level, e.g., expression level, and/or activity of IL-2;

[2276] (vii) a delay, e.g., at least 1, 2, 3, 4, 5, 6, 7, 8, 9, 10 hours delay, in increased level, e.g., expression level, and/or activity of IFNg; or

[2277] (viii) increased level, e.g., expression level, and/or activity of IL-15,

[2278] e.g., wherein (i)-(vii) are relative to the cytokine profile of the non-TCRβV-binding T cell engager.

[2279] In some embodiments, binding of the anti-TCRβV antibody molecule to the TCRβV region results in reduced cytokine storm, e.g., reduced cytokine release syndrome (CRS), as measured by an assay of Example 3, e.g., relative to the cytokine storm induced by the non-TCRβV-binding T cell engager.

[2280] In some embodiments, binding of the anti-TCRβV antibody molecule to the TCRβV region results in one, two, three or all of:

[2281] (ix) reduced T cell proliferation kinetics;

[2282] (x) cell killing, e.g., target cell killing, e.g. cancer cell killing, e.g., as measured by an assay of Example 4;

[2283] (xi) increased Natural Killer (NK) cell proliferation, e.g., expansion; or

[2284] (xii) expansion, e.g., at least about 1.1-10 fold expansion (e.g., at least about 1.1, 1.2, 1.3, 1.4, 1.5, 2, 3, 4, 5, 6, 7, 8, 9, or 10 fold expansion), of a population of T cells having a memory-like phenotype,

[2285] e.g., relative to the non-TCRβV-binding T cell engager.

[2286] In some embodiments, the anti-TCRβV antibody molecule binds to an outward facing region (e.g., epitope) on a TCRβV protein, e.g., as depicted by the circled area in FIG. 24A.

[2287] In some embodiments, the outward facing region on the TCRβV protein comprises a structurally conserved region of TCRβV, e.g., a region of TCRβV having a similar structure across one or more TCRβV subfamilies.

[2288] In some embodiments, the method further comprises administering (e.g., sequentially, simultaneously or concurrently) a second agent, e.g., therapeutic agent, e.g., as described herein.

[2289] In some embodiments, the second agent, e.g., therapeutic agent, comprises a chemotherapeutic agent, a biologic agent, hormonal therapy), radiation, or surgery.

[2290] In some embodiments, the disease is a cancer, e.g., a solid tumor or a hematological cancer, or a metastatic lesion.

[2291] In some embodiments, the cancer antigen is BCMA or FcRH5.

[2292] Unless otherwise defined, all technical and scientific terms used herein have the same meaning as commonly understood by one of ordinary skill in the art to which this invention belongs. Although methods and materials similar or equivalent to those described herein can be used in the practice or testing of the present invention, suitable methods and materials are described below. All publications, patent applications, patents, and other references mentioned herein are incorporated by reference in their entirety. In the case of conflict, the present specification, including definitions, will control. In addition, the materials, methods, and examples are illustrative only and are not intended to be limiting.

[2293] Other features and advantages of the invention will be apparent from the following detailed description and claims.

### INCORPORATION BY REFERENCE

[2294] All publications and patents mentioned herein are hereby incorporated by reference in their entirety as if each individual publication or patent was specifically and individually indicated to be incorporated by reference.

### EQUIVALENTS

[2295] Those skilled in the art will recognize, or be able to ascertain using no more than routine experimentation, many equivalents to the specific embodiments of the invention described herein. Such equivalents are intended to be encompassed by the following claims.

What is claimed is:

1.-183. (canceled)

184. A method of treating cancer in a human subject in need thereof comprising administering to the human subject a therapeutically effective amount of a molecule comprising an antigen binding domain that binds to a T cell receptor beta variable (TCRβV) region, wherein the antigen binding domain comprises:
a heavy chain variable region (VH) comprising a heavy chain complementarity determining region 3 (HC CDR3) comprising the sequence SYYSYDVLDY (SEQ ID NO: 47) or the sequence SLNWDYGLDY (SEQ ID NO: 1104);
thereby treating the cancer in the human subject.

185. The method of claim 184, wherein the VH comprises:
(i) the HC CDR3 comprising the sequence SYYSYDVLDY (SEQ ID NO: 47);
(ii) a HC CDR1 comprising:
the sequence TYYIH (SEQ ID NO: 45),
the sequence GHDFRLTYIH (amino acids 26-35 of SEQ ID NO: 1346), or
the sequence GHDFKLTYIH (amino acids 26-35 of SEQ ID NO: 1370); and
(iii) a HC CDR2 comprising:
the sequence WFFPGSGNIKYNEKFKG (SEQ ID NO: 46),
the sequence RVSAGSGNVKYNEKFKG (amino acids 50-66 of SEQ ID NO: 1346),
the sequence RVYAGSGNTKYNEKFKG (amino acids 50-66 of SEQ ID NO: 1356), or
the sequence RVSAGSGNVNYAQKFQG (amino acids 50-66 of SEQ ID NO: 1370).

186. The method of claim 185, wherein the VH comprises:
(i) the HC CDR3 comprising the sequence SYYSYDVLDY (SEQ ID NO: 47);
(ii) the HC CDR1 comprising the sequence TYYIH (SEQ ID NO: 45); and
(iii) the HC CDR2 comprising the sequence WFFPGSGNIKYNEKFKG (SEQ ID NO: 46).

187. The method of claim 185, wherein the VH comprises:
(i) the HC CDR3 comprising the sequence SYYSYDVLDY (SEQ ID NO: 47);
(ii) the HC CDR1 comprising the sequence GHDFRLTYIH (amino acids 26-35 of SEQ ID NO: 1346); and
(iii) the HC CDR2 comprising the sequence RVSAGSGNVKYNEKFKG (amino acids 50-66 of SEQ ID NO: 1346).

188. The method of claim 185, wherein the VH comprises:
(i) the HC CDR3 comprising the sequence SYYSYDVLDY (SEQ ID NO: 47);
(ii) the HC CDR1 comprising the sequence GHDFRLTYIH (amino acids 26-35 of SEQ ID NO: 1356); and
(iii) the HC CDR2 comprising the sequence RVYAGSGNTKYNEKFKG (amino acids 50-66 of SEQ ID NO: 1356).

189. The method of claim 185, wherein the VH comprises:
(i) the HC CDR3 comprising the sequence SYYSYDVLDY (SEQ ID NO: 47);
(ii) the HC CDR1 comprising the sequence GHDFKLTYIH (amino acids 26-35 of SEQ ID NO: 1370); and
(iii) the HC CDR2 comprising the sequence RVSAGSGNVNYAQKFQG (amino acids 50-66 of SEQ ID NO: 1370).

190. The method of claim 184, wherein the VH comprises:
(i) the HC CDR3 comprising the sequence SLNWDYGLDY (SEQ ID NO: 1104);
(ii) a HC CDR1 comprising:
the sequence SAYMH (SEQ ID NO: 1102), or
the sequence DTYMY (SEQ ID NO: 1120); and
(iii) a HC CDR2 comprising:
the sequence RIDPATGKTKYAPKFQA (SEQ ID NO: 1103), or
the sequence RIDPANGNTKYDPKFQD (SEQ ID NO: 1121).

191. The method of claim 190, wherein the VH comprises:
(i) the HC CDR3 comprising the sequence SLNWDYGLDY (SEQ ID NO: 1104);
(ii) the HC CDR1 comprising the sequence SAYMH (SEQ ID NO: 1102); and
(iii) the HC CDR2 comprising the sequence RIDPATGKTKYAPKFQA (SEQ ID NO: 1103).

192. The method of claim 190, wherein the VH comprises:
(i) the HC CDR3 comprising the sequence SLNWDYGLDY (SEQ ID NO: 1104);
(ii) the HC CDR1 comprising the sequence DTYMY (SEQ ID NO: 1120); and
(iii) the HC CDR2 comprising the sequence RIDPANGNTKYDPKFQD (SEQ ID NO: 1121).

193. The method of claim 190, wherein the antigen binding domain comprises a light chain variable region (VL) comprising:
(i) a light chain complementarity determining region 3 (LC CDR3) comprising the sequence QQSIEDPWT (SEQ ID NO:1109) or the sequence QQSNEDPYT (SEQ ID NO:1128);
(ii) a light chain complementarity determining region 1 (LC CDR1) comprising the sequence RASKSVSILGTHLIH (SEQ ID NO:1107) or the sequence RASESVDSYGNSFMH (SEQ ID NO:1126); and
(iii) a light chain complementarity determining region 2 (LC CDR2) comprising the sequence AASNLES (SEQ ID NO: 1108) or the sequence RASNLES (SEQ ID NO:1127).

194. The method of claim 193, wherein the VL comprises:
(i) the LC CDR3 comprising the sequence QQSIEDPWT (SEQ ID NO:1109);
(ii) a LC CDR1 comprising the sequence RASKSVSILGTHLIH (SEQ ID NO:1107); and
(iii) a LC CDR2 comprising the sequence AASNLES (SEQ ID NO: 1108).

195. The method of claim 193, wherein the VL comprises:
(i) the LC CDR3 comprising the sequence QQSNEDPYT (SEQ ID NO:1128);
(ii) a LC CDR1 comprising the sequence RASESVDSYGNSFMH (SEQ ID NO:1126); and
(iii) a LC CDR2 comprising the sequence RASNLES (SEQ ID NO:1127).

196. The method of claim 185, wherein the antigen binding domain comprises a VL comprising:
(i) a LC CDR3 comprising:
the sequence QQFKSYPLT (SEQ ID NO: 53),
the sequence QQFTSSPFT (SEQ ID NO: 65),
the sequence QQSIEDPWT (SEQ ID NO: 1109), or
the sequence QQSNEDPYT (SEQ ID NO:1128);
(ii) a LC CDR1 comprising:
the sequence KASQNVGINVV (SEQ ID NO: 51),
the sequence RASSSVNYIY (SEQ ID NO: 63),
the sequence RASKSVSILGTHLIH (SEQ ID NO: 1107),
the sequence RASESVDSYGNSFMH (SEQ ID NO: 1126),
the sequence KASQNVADRVV (amino acids 24-34 of SEQ ID NO: 1349),
the sequence KASQNVEDRVV (amino acids 24-34 of SEQ ID NO: 1357), or
the sequence RASQNVDNRLG (amino acids 24-34 of SEQ ID NO: 1365); and
(iii) a LC CDR2 comprising:
the sequence SSSHRYS (SEQ ID NO: 52),
the sequence YTSNLAP (SEQ ID NO: 64),
the sequence AASNLES (SEQ ID NO: 1108),
the sequence RASNLES (SEQ ID NO:1127), or
the sequence SSSHRYK (amino acids 50-56 of SEQ ID NO: 1349).

197. The method of claim 196, wherein the VL comprises:
(i) the LC CDR3 comprising the sequence QQFKSYPLT (SEQ ID NO: 53);
(ii) the LC CDR1 comprising the sequence KASQNVGINVV (SEQ ID NO: 51); and
(iii) the LC CDR2 comprising the sequence SSSHRYS (SEQ ID NO: 52).

198. The method of claim 186, wherein the VL comprises:
(i) the LC CDR3 comprising the sequence QQFKSYPLT (SEQ ID NO: 53);
(ii) the LC CDR1 comprising the sequence KASQNVGINVV (SEQ ID NO: 51); and
(iii) the LC CDR2 comprising the sequence SSSHRYS (SEQ ID NO: 52).

199. The method of claim 196, wherein the VL comprises:
(i) the LC CDR3 comprising the sequence QQFTSSPFT (SEQ ID NO: 65);
(ii) the LC CDR1 comprising the sequence RASSSVNYIY (SEQ ID NO: 63); and
(iii) the LC CDR2 comprising the sequence YTSNLAP (SEQ ID NO: 64).

200. The method of claim 196, wherein the VL comprises:
(i) the LC CDR3 comprising the sequence QQSIEDPWT (SEQ ID NO: 1109);
(ii) the LC CDR1 comprising the sequence RASKSVSILGTHLIH (SEQ ID NO: 1107); and
(iii) the LC CDR2 comprising the sequence AASNLES (SEQ ID NO: 1108).

201. The method of claim 196, wherein the VL comprises:
(i) the LC CDR3 comprising the sequence QQSNEDPYT (SEQ ID NO:1128);
(ii) the LC CDR1 comprising the sequence RASESVDSYGNSFMH (SEQ ID NO: 1126); and
(iii) the LC CDR2 comprising the sequence RASNLES (SEQ ID NO:1127).

202. The method of claim 196, wherein the VL comprises:
(i) the LC CDR3 comprising the sequence QQFKSYPLT (SEQ ID NO: 53);
(ii) the LC CDR1 comprising the sequence KASQNVADRVV (amino acids 24-34 of SEQ ID NO: 1349); and
(iii) the LC CDR2 comprising the sequence SSSHRYK (amino acids 50-56 of SEQ ID NO: 1349).

203. The method of claim 187, wherein VL comprises:
(i) the LC CDR3 comprising the sequence QQFKSYPLT (SEQ ID NO: 53);
(ii) the LC CDR1 comprising the sequence KASQNVADRVV (amino acids 24-34 of SEQ ID NO: 1349); and
(iii) the LC CDR2 comprising the sequence SSSHRYK (amino acids 50-56 of SEQ ID NO:
1349).

204. The method of claim 196, wherein the VL comprises:
(i) the LC CDR3 comprising the sequence QQFKSYPLT (SEQ ID NO: 53);
(ii) the LC CDR1 comprising the sequence KASQNVEDRVV (amino acids 24-34 of SEQ ID NO: 1357); and
(iii) the LC CDR2 comprising the sequence SSSHRYK (amino acids 50-56 of SEQ ID NO:
1349).

205. The method of claim 188, wherein VL comprises:
(i) the LC CDR3 comprising the sequence QQFKSYPLT (SEQ ID NO: 53);
(ii) the LC CDR1 comprising the sequence KASQNVEDRVV (amino acids 24-34 of SEQ ID NO: 1357); and
(iii) the LC CDR2 comprising the sequence SSSHRYK (amino acids 50-56 of SEQ ID NO: 1349).

206. The method of claim 196, wherein the VL comprises:
(i) the LC CDR3 comprising the sequence QQFKSYPLT (SEQ ID NO: 53);
(ii) the LC CDR1 comprising the sequence RASQNVDNRLG (amino acids 24-34 of SEQ ID NO: 1365); and
(iii) the LC CDR2 comprising the sequence SSSHRYK (amino acids 50-56 of SEQ ID NO: 1349).

207. The method of claim 189, wherein VL comprises:
(i) the LC CDR3 comprising the sequence QQFKSYPLT (SEQ ID NO: 53);
(ii) the LC CDR1 comprising the sequence RASQNVDNRLG (amino acids 24-34 of SEQ ID NO: 1365); and
(iii) the LC CDR2 comprising the sequence SSSHRYK (amino acids 50-56 of SEQ ID NO: 1349).

208. The method of claim 191, wherein the VL comprises:
(i) the LC CDR3 comprising the sequence QQSIEDPWT (SEQ ID NO:1109);
(ii) a LC CDR1 comprising the sequence RASKSVSILGTHLIH (SEQ ID NO:1107); and
(iii) a LC CDR2 comprising the sequence AASNLES (SEQ ID NO: 1108).

209. The method of claim 203, wherein
the VH comprises a sequence having at least 80% sequence identity to SEQ ID NO: 1346, and the VL comprises a sequence having at least 80% sequence identity to SEQ ID NO: 1349.

210. The method of claim 208, wherein
the VH comprises a sequence having at least 80% sequence identity to SEQ ID NO: 1113, and the VL comprises a sequence having at least 80% sequence identity to SEQ ID NO: 1111.

211. The method of claim 198, wherein
the VH comprises a sequence having at least 80% sequence identity to SEQ ID NO: 1100, and the VL comprises a sequence having at least 80% sequence identity to SEQ ID NO: 1101.

212. The method of claim 205, wherein
the VH comprises a sequence having at least 80% sequence identity to SEQ ID NO: 1356, and the VL comprises a sequence having at least 80% sequence identity to SEQ ID NO: 1357.

213. The method of claim 207, wherein
the VH comprises a sequence having at least 80% sequence identity to SEQ ID NO: 1370, and the VL comprises a sequence having at least 80% sequence identity to SEQ ID NO: 1365.

214. The method of claim 184, wherein the antigen binding domain comprises:
(i) a VH comprising a sequence having at least 80% sequence identity to the sequence of SEQ ID NO: 1100, and a VL comprising a sequence having at least 80% sequence identity to the sequence of SEQ ID NO: 1101;
(ii) a VH comprising a sequence having at least 80% sequence identity to the sequence of SEQ ID NO: 1346, and a VL comprising a sequence having at least 80% sequence identity to the sequence of SEQ ID NO: 1349;
(iii) a VH comprising a sequence having at least 80% sequence identity to the sequence of SEQ ID NO: 1356, and a VL comprising a sequence having at least 80% sequence identity to the sequence of SEQ ID NO: 1357;
(iv) a VH comprising a sequence having at least 80% sequence identity to the sequence of SEQ ID NO: 1370, and a VL comprising a sequence having at least 80% sequence identity to the sequence of SEQ ID NO: 1365; or
(v) a VH comprising a sequence having at least 80% sequence identity to the sequence of SEQ ID NO: 1112, SEQ ID NO: 1113, SEQ ID NO: 1114, SEQ ID NO: 1115, or SEQ ID NO: 1116, and a VL comprising a sequence having at least 80% sequence identity to the sequence of SEQ ID NO: 1111, SEQ ID NO: 1117, SEQ ID NO: 1118, or SEQ ID NO: 1119.

215. The method of claim 214, wherein the antigen binding domain comprises:
(i) a VH comprising the sequence of SEQ ID NO: 1100, and a VL comprising the sequence of SEQ ID NO: 1101;
(ii) a VH comprising the sequence of SEQ ID NO: 1346, and a VL comprising the sequence of SEQ ID NO: 1349;
(iii) a VH comprising the sequence of SEQ ID NO: 1356, and a VL comprising the sequence of SEQ ID NO: 1357;
(iv) a VH comprising the sequence of SEQ ID NO: 1370, and a VL comprising the sequence of SEQ ID NO: 1365; or
(v) a VH comprising the sequence of SEQ ID NO: 1112, SEQ ID NO: 1113, SEQ ID NO: 1114, SEQ ID NO: 1115, or SEQ ID NO: 1116, and a VL comprising a sequence having at least 80% sequence identity to the sequence of SEQ ID NO: 1111, SEQ ID NO: 1117, SEQ ID NO: 1118, or SEQ ID NO: 1119.

216. The method of claim 214, wherein the antigen binding domain is a Fab or a single chain Fv (scFv).

217. The method of claim 214, wherein the molecule comprises at least two non-contiguous polypeptide chains; wherein a first polypeptide chain of the at least two non-contiguous polypeptide chains comprises a first Fc region, and a second polypeptide chain of the at least two non-contiguous polypeptide chains comprises a second Fc region; and wherein the first Fc region and the second Fc region comprise an Fc interface with a knob-in-a hole.

218. The method of claim 217, wherein the molecule comprises the first polypeptide chain, the second polypeptide chain, and a third polypeptide chain, wherein the first polypeptide chain, the second polypeptide chain, and the third polypeptide chain are non-contiguous, and wherein:
(i) the first polypeptide chain comprises a VH comprising the sequence of SEQ ID NO: 1346, wherein the VH is linked to the first Fc region,
(ii) the second polypeptide chain comprises a cytokine molecule, wherein the cytokine molecule is linked to the second Fc region, wherein the cytokine molecule comprises:
(a) IL-2 or functional variant thereof comprising the sequence of SEQ ID NO: 2270, or
(b) IL-15 or functional variant thereof comprising the sequence of SEQ ID NO: 2170, wherein the IL-15 or functional variant thereof is covalently linked to an IL15Ralpha dimerizing domain, and
(iii) the third polypeptide chain comprises a VL comprising the sequence of SEQ ID NO: 1349, wherein the VL is linked to a light chain constant region comprising the sequence of SEQ ID NO: 39.

219. The method of claim 217, wherein the molecule comprises the first polypeptide chain, the second polypeptide chain, and a third polypeptide chain, wherein the first polypeptide chain, the second polypeptide chain, and the third polypeptide chain are non-contiguous, and wherein:
(i) the first polypeptide chain comprises a VH comprising the sequence of SEQ ID NO: 1113, wherein the VH is linked to the first Fc region,
(ii) the second polypeptide chain comprises a cytokine molecule, wherein the cytokine molecule is linked to the second Fc region, and
(iii) the third polypeptide chain comprises a VL comprising a sequence having at least 80% sequence identity to SEQ ID NO: 1111, wherein the VL is linked to a light chain constant region comprising the sequence of SEQ ID NO: 39.

220. The method of claim 217, wherein the molecule comprises the first polypeptide chain, the second polypeptide chain, and a third polypeptide chain, wherein the first polypeptide chain, the second polypeptide chain, and the third polypeptide chain are non-contiguous, and wherein:
(i) the first polypeptide chain comprises a VH comprising the sequence of SEQ ID NO: 1100, wherein the VH is linked to the first Fc region,
(ii) the second polypeptide chain comprises a cytokine molecule, wherein the cytokine molecule is linked to the second Fc region, wherein the cytokine molecule comprises:
(a) IL-2 or functional variant thereof comprising the sequence of SEQ ID NO: 2270, or
(b) IL-15 or functional variant thereof comprising the sequence of SEQ ID NO: 2170, wherein the IL-15 or functional variant thereof is covalently linked to an IL15Ralpha dimerizing domain, and
(iii) the third polypeptide chain comprises a VL comprising a sequence having at least 80% sequence identity to SEQ ID NO: 1101, wherein the VL is linked to a light chain constant region comprising the sequence of SEQ ID NO: 39.

221. The method of claim 217, wherein the molecule comprises the first polypeptide chain, the second polypeptide chain, and a third polypeptide chain, wherein the first polypeptide chain, the second polypeptide chain, and the third polypeptide chain are non-contiguous, and wherein:
(i) the first polypeptide chain comprises a VH comprising the sequence of SEQ ID NO: 1356, wherein the VH is linked to the first Fc region,
(ii) the second polypeptide chain comprises a cytokine molecule, wherein the cytokine molecule is linked to the second Fc region, and
(iii) the third polypeptide chain comprises a VL comprising a sequence having at least 80% sequence identity to SEQ ID NO: 1357, wherein the VL is linked to a light chain constant region comprising the sequence of SEQ ID NO: 39.

222. The method of claim 217, wherein the molecule comprises the first polypeptide chain, the second polypeptide chain, and a third polypeptide chain, wherein the first polypeptide chain, the second polypeptide chain, and the third polypeptide chain are non-contiguous, and wherein:
(i) the first polypeptide chain comprises a VH comprising the sequence of SEQ ID NO: 1370, wherein the VH is linked to the first Fc region,
(ii) the second polypeptide chain comprises a cytokine molecule, wherein the cytokine molecule is linked to the second Fc region, wherein the cytokine molecule comprises:
(a) IL-2 or functional variant thereof comprising the sequence of SEQ ID NO: 2270, or
(b) IL-15 or functional variant thereof comprising the sequence of SEQ ID NO: 2170, wherein the IL-15 or functional variant thereof is covalently linked to an IL15Ralpha dimerizing domain, and
(iii) the third polypeptide chain comprises a VL comprising a sequence having at least 80% sequence identity to SEQ ID NO: 1365, wherein the VL is linked to a light chain constant region comprising the sequence of SEQ ID NO: 39.

223. The method of claim 218, wherein:
(1) the first Fc region and the second Fc region each comprises an Asn297Ala mutation
(2) the first Fc region and the second Fc region each comprises a sequence having at least 98% sequence identity to the sequence of SEQ ID NO: 41 or SEQ ID NO: 42, and
(3) the first Fc region comprises T366S, L368A, and Y407V substitutions, and the second Fc region comprises T366W substitution; or the first Fc region comprises T366W substitution, and the second Fc region comprises T366S, L368A, and Y407V substitutions.

224. The method of claim 219, wherein:
(1) the first Fc region and the second Fc region each comprises an Asn297Ala mutation
(2) the first Fc region and the second Fc region each comprises a sequence having at least 98% sequence identity to the sequence of SEQ ID NO: 41 or SEQ ID NO: 42, and
(3) the first Fc region comprises T366S, L368A, and Y407V substitutions, and the second Fc region comprises T366W substitution; or the first Fc region comprises T366W substitution, and the second Fc region comprises T366S, L368A, and Y407V substitutions.

225. The method of claim 220, wherein:
(1) the first Fc region and the second Fc region each comprises an Asn297Ala mutation
(2) the first Fc region and the second Fc region each comprises a sequence having at least 98% sequence identity to the sequence of SEQ ID NO: 41 or SEQ ID NO: 42, and
(3) the first Fc region comprises T366S, L368A, and Y407V substitutions, and the second Fc region comprises T366W substitution; or the first Fc region comprises T366W substitution, and the second Fc region comprises T366S, L368A, and Y407V substitutions.

226. The method of claim 221, wherein:
(1) the first Fc region and the second Fc region each comprises an Asn297Ala mutation
(2) the first Fc region and the second Fc region each comprises a sequence having at least 98% sequence identity to the sequence of SEQ ID NO: 41 or SEQ ID NO: 42, and
(3) the first Fc region comprises T366S, L368A, and Y407V substitutions, and the second Fc region comprises T366W substitution; or the first Fc region comprises T366W substitution, and the second Fc region comprises T366S, L368A, and Y407V substitutions.

227. The method of claim 222, wherein:
(1) the first Fc region and the second Fc region each comprises an Asn297Ala mutation
(2) the first Fc region and the second Fc region each comprises a sequence having at least 98% sequence identity to the sequence of SEQ ID NO: 41 or SEQ ID NO: 42, and
(3) the first Fc region comprises T366S, L368A, and Y407V substitutions, and the second Fc region comprises T366W substitution; or the first Fc region comprises T366W substitution, and the second Fc region comprises T366S, L368A, and Y407V substitutions.

228. The method of claim 218, wherein:
(i) the first Fc region comprising the sequence of amino acids 1-328 of SEQ ID NO: 42, with the proviso that Tyr at the position 349, Thr at the position 366, Leu at the position 368, and Tyr at the position 407 according to EU Numbering are replaced with Cys, Ser, Ala, and Val, respectively; and
(ii) the second polypeptide chain comprises the cytokine molecule linked to the second Fc region via the sequence of SEQ ID NO: 3308, wherein the second Fc region comprises the sequence of amino acids 104-328 of SEQ ID NO: 42, with the proviso that Ser at the position 354 and Thr at the position 366 according to EU Numbering are replaced with Cys and Trp, respectively.

229. The method of claim 219, wherein:
(i) the first Fc region comprising the sequence of amino acids 1-328 of SEQ ID NO: 42, with the proviso that Tyr at the position 349, Thr at the position 366, Leu at the position 368, and Tyr at the position 407 according to EU Numbering are replaced with Cys, Ser, Ala, and Val, respectively; and
(ii) the second polypeptide chain comprises the cytokine molecule linked to the second Fc region via the sequence of SEQ ID NO: 3308, wherein the second Fc region comprises the sequence of amino acids 104-328 of SEQ ID NO: 42, with the proviso that Ser at the position 354 and Thr at the position 366 according to EU Numbering are replaced with Cys and Trp, respectively.

230. The method of claim 220, wherein:
(i) the first Fc region comprising the sequence of amino acids 1-328 of SEQ ID NO: 42, with the proviso that Tyr at the position 349, Thr at the position 366, Leu at the position 368, and Tyr at the position 407 according to EU Numbering are replaced with Cys, Ser, Ala, and Val, respectively; and
(ii) the second polypeptide chain comprises the cytokine molecule linked to the second Fc region via the sequence of SEQ ID NO: 3308, wherein the second Fc region comprises the sequence of amino acids 104-328 of SEQ ID NO: 42, with the proviso that Ser at the position 354 and Thr at the position 366 according to EU Numbering are replaced with Cys and Trp, respectively.

231. The method of claim 221, wherein:
(i) the first Fc region comprising the sequence of amino acids 1-328 of SEQ ID NO: 42, with the proviso that Tyr at the position 349, Thr at the position 366, Leu at the position 368, and Tyr at the position 407 according to EU Numbering are replaced with Cys, Ser, Ala, and Val, respectively; and
(ii) the second polypeptide chain comprises the cytokine molecule linked to the second Fc region via the sequence of SEQ ID NO: 3308, wherein the second Fc region comprises the sequence of amino acids 104-328 of SEQ ID NO: 42, with the proviso that Ser at the position 354 and Thr at the position 366 according to EU Numbering are replaced with Cys and Trp, respectively.

232. The method of claim 222, wherein:
(i) the first Fc region comprising the sequence of amino acids 1-328 of SEQ ID NO: 42, with the proviso that Tyr at the position 349, Thr at the position 366, Leu at the position 368, and Tyr at the position 407 according to EU Numbering are replaced with Cys, Ser, Ala, and Val, respectively; and
(ii) the second polypeptide chain comprises the cytokine molecule linked to the second Fc region via the sequence of SEQ ID NO: 3308, wherein the second Fc region comprises the sequence of amino acids 104-328 of SEQ ID NO: 42, with the proviso that Ser at the position 354 and Thr at the position 366 according to EU Numbering are replaced with Cys and Trp, respectively.

233. The method of claim 217, wherein the second polypeptide chain comprises the antigen binding domain comprising the sequence of SEQ ID NO: 1331, and a cytokine molecule, wherein the cytokine molecule comprises IL-2 or functional variant thereof comprising the sequence of SEQ ID NO: 2270, and
wherein the antigen binding domain, the cytokine molecule, and the second Fc region are linked.

234. A method of expanding an immune cell population comprising contacting the immune cell population with a composition a molecule comprising an antigen binding domain that binds to a T cell receptor beta variable (TCRβV) region, wherein the antigen binding domain comprises:
(i) a heavy chain variable region (VH) comprising a heavy chain complementarity determining region 3 (HC CDR3) comprising the sequence SYYSYDVLDY (SEQ ID NO: 47) or the sequence SLNWDYGLDY (SEQ ID NO: 1104),
thereby expanding the immune cell population, and
wherein the expansion occurs in vivo or ex vivo.

The application's sequence listing, which the Patent Office published only in electronic form, follows.

SEQUENCE LISTING (3642 sequences)

SEQ ID NO: 1 - protein, 119 aa, Artificial Sequence
  Description of Artificial Sequence: Synthetic polypeptide
QVQLQQSGPELVKPGTSVKISCKASGYSFTTYYIHWVKQRPGQGLEWIGWFFPGSGNIKYNEKFKGKATLTADTSSSTAYMQLSSLTSEESAVYFCAGSYYSYDVLDYWGHGTTLTVSS

SEQ ID NO: 2 - protein, 107 aa, Artificial Sequence
  Description of Artificial Sequence: Synthetic polypeptide
DILMTQSQKFMSTSLGDRVSVSCKASQNVGINVVWHQQKPGQSPKALIYSSSHRYSGVPDRFTGSGSGTDFTLTINNVQSEDLAEYFCQQFKSYPLTFGAGTKLELK

SEQ ID NO: 3 - protein, 10 aa, Artificial Sequence
  Description of Artificial Sequence: Synthetic peptide
GYSFTTYYIH

SEQ ID NO: 4 - protein, 17 aa, Artificial Sequence
  Description of Artificial Sequence: Synthetic peptide
WFFPGSGNIKYNEKFKG

SEQ ID NO: 5 - protein, 10 aa, Artificial Sequence
  Description of Artificial Sequence: Synthetic peptide
SYYSYDVLDY

SEQ ID NO: 6 - protein, 11 aa, Artificial Sequence
  Description of Artificial Sequence: Synthetic peptide
KASQNVGINVV

SEQ ID NO: 7 - protein, 7 aa, Artificial Sequence
  Description of Artificial Sequence: Synthetic peptide
SSSHRYS

SEQ ID NO: 8 - protein, 9 aa, Artificial Sequence
  Description of Artificial Sequence: Synthetic peptide
QQFKSYPLT

SEQ ID NO: 9 - protein, 119 aa, Artificial Sequence
  Description of Artificial Sequence: Synthetic polypeptide
QVQLVQSGAEVKKPGSSVKVSCKASGYSFTTYYIHWVRQAPGQGLEWMGWFFPGSGNIKYNEKFKGRVTITADTSTSTAYMELSSLRSEDTAVYYCAGSYYSYDVLDYWGQGTTVTVSS

SEQ ID NO: 10 - protein, 107 aa, Artificial Sequence
  Description of Artificial Sequence: Synthetic polypeptide
DIQMTQSPSFLSASVGDRVTITCKASQNVGINVVWHQQKPGKAPKALIYSSSHRYSGVPSRFSGSGSGTEFTLTISSLQPEDFATYFCQQFKSYPLTFGQGTKLEIK

SEQ ID NO: 11 - protein, 107 aa, Artificial Sequence
  Description of Artificial Sequence: Synthetic polypeptide
DIQMTQSPSSLSASVGDRVTITCKASQNVGINVVWHQQKPGKVPKALIYSSSHRYSGVPSRFSGSGSGTDFTLTISSLQPEDVATYFCQQFKSYPLTFGQGTKLEIK

SEQ ID NO: 12 - DNA, 357 bp, Artificial Sequence
  Description of Artificial Sequence: Synthetic polynucleotide
caggtgcagctggttcagtctggcgccgaagtgaagaaacctggctcctccgtgaaggtgtcctgcaaggcttccggctactccttcaccacctactacatccactgggtccgacaggcccctggacaaggattggaatggatgggctggttcttccccggctccggcaacatcaagtacaacgagaagttcaagggccgcgtgaccatcaccgccgacacctctacctctaccgcctacatggaactgtccagcctgagatctgaggacaccgccgtgtactactgcgccggctcctactactcttacgacgtgctggattactggggccagggcaccacagtgacagtgtcctct

SEQ ID NO: 13 - DNA, 321 bp, Artificial Sequence
  Description of Artificial Sequence: Synthetic polynucleotide
gacatccagatgacccagtctccatccttcctgtccgcctctgtgggcgacagagtgaccatcacatgcaaggcctctcagaacgtgggcatcaacgtcgtgtggcaccagcagaagcctggcaaggctcctaaggctctgatctactcctccagccaccggtactctggcgtgccctctagattttccggctctggctctggcaccgagtttaccctgacaatctccagcctgcagcctgaggacttcgccacctacttttgccagcagttcaagagctaccctctgacctttggccagggcaccaagctggaaatcaag

SEQ ID NO: 14 - DNA, 321 bp, Artificial Sequence
  Description of Artificial Sequence: Synthetic polynucleotide
gacatccagatgacccagtctccatcctctctgtccgcctctgtgggcgacagagtgaccatcacatgcaaggcctctcagaacgtgggcatcaacgtcgtgtggcaccagcagaaacctggcaaggtgcccaaggctctgatctactcctccagccacagatactccggcgtgccctctagattctccggctctggctctggcaccgactttaccctgacaatctccagcctgcagcctgaggacgtggccacctacttttgccagcagttcaagagctaccctctgacctttggccagggcaccaagctggaaatcaag

SEQ ID NO: 15 - protein, 117 aa, Artificial Sequence
  Description of Artificial Sequence: Synthetic polypeptide
DVQLVESGGGLVQPGGSRKLSCAASGFTFSNFGMHWVRQAPDKGLEWVAYISSGSSTIYYADTLKGRFTISRDNPKNTLFLQMTSLRSEDTAMYYCARRGEGAMDYWGQGTSVTVSS

SEQ ID NO: 16 - protein, 106 aa, Artificial Sequence
  Description of Artificial Sequence: Synthetic polypeptide
ENVLTQSPAIMSASLGEKVTMSCRASSSVNYIYWYQQKSDASPKLWIYYTSNLAPGVPTRFSGSGSGNSYSLTISSMEGEDAATYYCQQFTSSPFTFGSGTKLEIK

SEQ ID NO: 17 - protein, 10 aa, Artificial Sequence
  Description of Artificial Sequence: Synthetic peptide
GFTFSNFGMH

SEQ ID NO: 18 - protein, 17 aa, Artificial Sequence
  Description of Artificial Sequence: Synthetic peptide
YISSGSSTIYYADTLKG

SEQ ID NO: 19 - protein, 8 aa, Artificial Sequence
  Description of Artificial Sequence: Synthetic peptide
RGEGAMDY

SEQ ID NO: 20 - protein, 10 aa, Artificial Sequence
  Description of Artificial Sequence: Synthetic peptide
RASSSVNYIY

SEQ ID NO: 21 - protein, 7 aa, Artificial Sequence
  Description of Artificial Sequence: Synthetic peptide
YTSNLAP

SEQ ID NO: 22 - protein, 9 aa, Artificial Sequence
  Description of Artificial Sequence: Synthetic peptide
QQFTSSPFT

SEQ ID NO: 23 - protein, 117 aa, Artificial Sequence
  Description of Artificial Sequence: Synthetic polypeptide
QVQLVESGGGVVQPGRSLRLSCAASGFTFSNFGMHWVRQAPGKGLEWVAYISSGSSTIYYADTLKGRFTISRDNSKNTLYLQMNSLRAEDTAVYYCARRGEGAMDYWGQGTTVTVSS

SEQ ID NO: 24 - protein, 117 aa, Artificial Sequence
  Description of Artificial Sequence: Synthetic polypeptide
EVQLVESGGGLVQPGGSLRLSCAASGFTFSNFGMHWVRQAPGKGLEWVSYISSGSSTIYYADTLKGRFTISRDNAKNSLYLQMNSLRAEDTAVYYCARRGEGAMDYWGQGTTVTVSS

SEQ ID NO: 25 - protein, 117 aa, Artificial Sequence
  Description of Artificial Sequence: Synthetic polypeptide
EVQLVESGGGLVQPGGSLRLSCAASGFTFSNFGMHWVRQAPGKGLEWVSYISSGSSTIYYADTLKGRFTISRDNSKNTLYLQMNSLRAEDTAVYYCARRGEGAMDYWGQGTTVTVSS

SEQ ID NO: 26 - protein, 106 aa, Artificial Sequence
  Description of Artificial Sequence: Synthetic polypeptide
DNQLTQSPSFLSASVGDRVTITCRASSSVNYIYWYQQKPGKAPKLLIYYTSNLAPGVPSRFSGSGSGNEYTLTISSLQPEDFATYYCQQFTSSPFTFGQGTKLEIK

SEQ ID NO: 27 - protein, 106 aa, Artificial Sequence
  Description of Artificial Sequence: Synthetic polypeptide
DNQLTQSPSSLSASVGDRVTITCRASSSVNYIYWYQQKPGKAPKLLIYYTSNLAPGVPSRFSGSGSGNDYTLTISSLQPEDFATYYCQQFTSSPFTFGQGTKLEIK

SEQ ID NO: 28 - protein, 106 aa, Artificial Sequence
  Description of Artificial Sequence: Synthetic polypeptide
ENVLTQSPATLSVSPGERATLSCRASSSVNYIYWYQQKPGQAPRLLIYYTSNLAPGIPARFSGSGSGNEYTLTISSLQSEDFAVYYCQQFTSSPFTFGQGTKLEIK

SEQ ID NO: 29 - protein, 105 aa, Artificial Sequence
  Description of Artificial Sequence: Synthetic polypeptide
QNVLTQPPSASGTPGQRVTISCRASSSVNYIYWYQQLPGTAPKLLIYYTSNLAPGVPDRFSGSGSGNSYSLAISGLRSEDEADYYCQQFTSSPFTFGTGTKVTVL

SEQ ID NO: 30 - protein, 105 aa, Artificial Sequence
  Description of Artificial Sequence: Synthetic polypeptide
SNELTQPPSVSVSPGQTARITCRASSSVNYIYWYQQKSGQAPVLVIYYTSNLAPGIPERFSGSGSGNMYTLTISGAQVEDEADYYCQQFTSSPFTFGTGTKVTVL

SEQ ID NO: 31 - DNA, 351 bp, Artificial Sequence
  Description of Artificial Sequence: Synthetic polynucleotide
gaggtgcagctggttgaatctggcggaggattggttcagcctggcggctctctgagactgtcttgtgccgcttctggcttcaccttctccaacttcggcatgcactgggtccgacaggcccctggaaaaggactggaatgggtgtcctacatctcctccggctcctccaccatctactacgctgacaccctgaagggcagattcaccatctctcgggacaacgccaagaactccctgtacctgcagatgaacagcctgagagccgaggacaccgccgtgtactactgtgctagaagaggcgagggcgccatggattattggggccagggaaccacagtgaccgtgtctagc

SEQ ID NO: 32 - DNA, 351 bp, Artificial Sequence
  Description of Artificial Sequence: Synthetic polynucleotide
gaggtgcagctggttgaatctggcggaggattggttcagcctggcggctctctgagactgtcttgtgccgcttctggcttcaccttctccaacttcggcatgcactgggtccgacaggcccctggaaaaggactggaatgggtgtcctacatctcctccggctcctccaccatctactacgctgacaccctgaagggcagattcaccatcagccgggacaactccaagaacaccctgtacctgcagatgaactccctgagagccgaggacaccgccgtgtactactgtgctagaagaggcgagggcgccatggattattggggccagggaaccacagtgaccgtgtctagc

SEQ ID NO: 33 - DNA, 351 bp, Artificial Sequence
  Description of Artificial Sequence: Synthetic polynucleotide
caggtgcagctggtggaatctggtggcggagttgtgcagcctggcagatccctgagactgtcttgtgccgcctctggcttcaccttctccaacttcggcatgcactgggtccgacaggcccctggaaaaggattggagtgggtcgcctacatctcctccggctcctccaccatctactacgctgacaccctgaagggcagattcaccatcagccgggacaactccaagaacaccctgtacctgcagatgaactccctgagagccgaggacaccgccgtgtactactgtgctagaagaggcgagggcgccatggattattggggccagggaaccacagtgaccgtgtctagc

SEQ ID NO: 34 - DNA, 318 bp, Artificial Sequence
  Description of Artificial Sequence: Synthetic polynucleotide
gataaccagctgacccagtctcctagcttcctgtctgcctctgtgggcgacagagtgacaattacctgccgggcctcctcctccgtgaactacatctactggtatcagcagaagcccggcaaggcccctaagctgctgatctactacacctccaatctggcccctggcgtgccctctagattttccggatctggctccggcaacgagtataccctgacaatctccagcctgcagcctgaggacttcgccacctactactgccagcagttcacctcctctccattcacctttggccagggcaccaagctggaaatcaaa

SEQ ID NO: 35 - DNA, 317 bp, Artificial Sequence
  Description of Artificial Sequence: Synthetic polynucleotide
ataaccagctgacccagtctccttccagcctgtctgcttctgtgggcgacagagtgacaattacctgccgggcctcctcctccgtgaactacatctactggtatcagcagaagcccggcaaggcccctaagctgctgatctactacacctccaatctggcccctggcgtgccctctagattttccggatctggctccggcaacgactataccctgacaatctccagcctgcagcctgaggacttcgccacctactactgccagcagttcacctcctctccattcacctttggccagggcaccaagctggaaatcaaa

SEQ ID NO: 36 - DNA, 318 bp, Artificial Sequence
  Description of Artificial Sequence: Synthetic polynucleotide
gagaatgtgctgacccagtctcctgccacactgtctgttagccctggcgagagagctaccctgagctgcagagcctcttcctccgtgaactacatctactggtatcagcagaagcccggccaggctcctagactgctgatctactacacctccaatctggcccctggcatccctgccagattttccggatctggctccggcaacgagtataccctgaccatctccagcctgcagtccgaggactttgctgtgtactattgccagcagttcacaagcagccctttcacctttggccagggcaccaagctggaaatcaaa

SEQ ID NO: 37 - DNA, 315 bp, Artificial Sequence
  Description of Artificial Sequence: Synthetic polynucleotide
cagaatgtgctgacccaacctccttccgcctctggcacacctggacagagagtgacaatctcctgccgggcctcctcctccgtgaactacatctactggtatcagcagctgcccggcaccgctcctaaactgctgatctactacacctccaatctggcccctggcgtgcccgatagattttccggatctggctccggcaactcctacagcctggctatctctggcctgagatctgaggacgaggccgactactactgccagcagttcacctcctctccattcacctttggcaccggcaccaaagtgacagttctt

SEQ ID NO: 38 - DNA, 315 bp, Artificial Sequence
  Description of Artificial Sequence: Synthetic polynucleotide
tctaatgagctgacccagcctccttccgtgtccgtgtctcctggacagaccgccagaattacctgccgggcctcctcctccgtgaactacatctactggtatcagcagaagtccggccaggctcctgtgctcgtgatctactacacctccaatctggcccctggcatccctgagagattctccggatctggctccggcaacatgtacaccctgaccatctctggcgcccaggtggaagatgaggccgactactactgccagcagttcacctcctctccattcacctttggcaccggcaccaaagtgacagttctt

SEQ ID NO: 39 - protein, 107 aa, Homo sapiens [sequence omitted]

SEQ ID NO: 40 - protein, 326 aa, Artificial Sequence
  Description of Artificial Sequence: Synthetic polypeptide
ASTKGPSVFPLAPCSRSTSESTAALGCLVKDYFPEPVTVSWNSGALTSGVHTFPAVLQSSGLYSLSSVVTVPSSSLGTKTYTCNVDHKPSNTKVDKRVESKYGPPCPPCPAPEFLGGPSVFLFPPKPKDTLMISRTPEVTCVVVDVSQEDPEVQFNWYVDGVEVHNAKTKPREEQFNSTYRVVSVLTVLHQDWLNGKEYKCKVSNKGLPSSIEKTISKAKGQPREPQVYTLPPSQEEMTKNQVSLTCLVKGFYPSDIAVEWESNGQPENNYKTTPPVLDSDGSFFLYSRLTVDKSRWQEGNVFSCSVMHEALHNHYTQKSLSLSLG

SEQ ID NO: 41 - protein, 330 aa, Homo sapiens
ASTKGPSVFPLAPSSKSTSGGTAALGCLVKDYFPEPVTVSWNSGALTSGVHTFPAVLQSSGLYSLSSVVTVPSSSLGTQTYICNVNHKPSNTKVDKRVEPKSCDKTHTCPPCPAPELLGGPSVFLFPPKPKDTLMISRTPEVTCVVVDVSHEDPEVKFNWYVDGVEVHNAKTKPREEQYNSTYRVVSVLTVLHQDWLNGKEYKCKVSNKALPAPIEKTISKAKGQPREPQVYTLPPSREEMTKNQVSLTCLVKGFYPSDIAVEWESNGQPENNYKTTPPVLDSDGSFFLYSKLTVDKSRWQQGNVFSCSVMHEALHNHYTQKSLSLSPGK

SEQ ID NO: 42 - protein, 330 aa, Artificial Sequence
  Description of Artificial Sequence: Synthetic polypeptide
ASTKGPSVFPLAPSSKSTSGGTAALGCLVKDYFPEPVTVSWNSGALTSGVHTFPAVLQSSGLYSLSSVVTVPSSSLGTQTYICNVNHKPSNTKVDKRVEPKSCDKTHTCPPCPAPELLGGPSVFLFPPKPKDTLMISRTPEVTCVVVDVSHEDPEVKFNWYVDGVEVHNAKTKPREEQYASTYRVVSVLTVLHQDWLNGKEYKCKVSNKALPAPIEKTISKAKGQPREPQVYTLPPSREEMTKNQVSLTCLVKGFYPSDIAVEWESNGQPENNYKTTPPVLDSDGSFFLYSKLTVDKSRWQQGNVFSCSVMHEALHNHYTQKSLSLSPGK

SEQ ID NO: 43 - DNA, 344 bp, Artificial Sequence
  Description of Artificial Sequence: Synthetic polynucleotide
atgagcatcggcctcctgtgctgtgcagccttgtctctcctgtgggcaggtccagtgaatgctggtgtcactcagaccccaaaattccaggtcctgaagacaggacagagcatgacactgcagtgtgcccaggatatgaaccatgaatacatgtcctggtatcgacaagacccaggcatggggctgaggctgattcattactcagttggtgctggtatcactgaccaaggagaagtccccaatggctacaatgtctccagatcaaccacagaggatttcccgctcaggctgctgtcggctgctccctcccagacatctgtgtacttctgtgccagcagttactc

SEQ ID NO: 44 - protein, 114 aa, Artificial Sequence
  Description of Artificial Sequence: Synthetic polypeptide
MSIGLLCCAALSLLWAGPVNAGVTQTPKFQVLKTGQSMTLQCAQDMNHEYMSWYRQDPGMGLRLIHYSVGAGITDQGEVPNGYNVSRSTTEDFPLRLLSAAPSQTSVYFCASSY

SEQ ID NO: 45 - protein, 5 aa, Artificial Sequence
  Description of Artificial Sequence: Synthetic peptide
TYYIH

SEQ ID NO: 46 - protein, 17 aa, Artificial Sequence
  Description of Artificial Sequence: Synthetic peptide
WFFPGSGNIKYNEKFKG

SEQ ID NO: 47 - protein, 10 aa, Artificial Sequence
  Description of Artificial Sequence: Synthetic peptide
SYYSYDVLDY

SEQ ID NO: 48 - protein, 7 aa, Artificial Sequence
  Description of Artificial Sequence: Synthetic peptide
GYSFTTY

SEQ ID NO: 49 - protein, 6 aa, Artificial Sequence
  Description of Artificial Sequence: Synthetic peptide
FPGSGN

SEQ ID NO: 50 - protein, 10 aa, Artificial Sequence
  Description of Artificial Sequence: Synthetic peptide
SYYSYDVLDY

SEQ ID NO: 51 - protein, 11 aa, Artificial Sequence
  Description of Artificial Sequence: Synthetic peptide
KASQNVGINVV

SEQ ID NO: 52 - protein, 7 aa, Artificial Sequence
  Description of Artificial Sequence: Synthetic peptide
SSSHRYS

SEQ ID NO: 53 - protein, 9 aa, Artificial Sequence
  Description of Artificial Sequence: Synthetic peptide
QQFKSYPLT

SEQ ID NO: 54 - protein, 11 aa, Artificial Sequence
  Description of Artificial Sequence: Synthetic peptide
KASQNVGINVV

SEQ ID NO: 55 - protein, 7 aa, Artificial Sequence
  Description of Artificial Sequence: Synthetic peptide
SSSHRYS

SEQ ID NO: 56 - protein, 9 aa, Artificial Sequence
  Description of Artificial Sequence: Synthetic peptide
QQFKSYPLT

SEQ ID NO: 57 - protein, 5 aa, Artificial Sequence
  Description of Artificial Sequence: Synthetic peptide
NFGMH

SEQ ID NO: 58 - protein, 17 aa, Artificial Sequence
  Description of Artificial Sequence: Synthetic peptide
YISSGSSTIYYADTLKG

SEQ ID NO: 59 - protein, 8 aa, Artificial Sequence
  Description of Artificial Sequence: Synthetic peptide
RGEGAMDY

SEQ ID NO: 60 - protein, 7 aa, Artificial Sequence
  Description of Artificial Sequence: Synthetic peptide
GFTFSNF

SEQ ID NO: 61 - protein, 6 aa, Artificial Sequence
  Description of Artificial Sequence: Synthetic peptide
SSGSST

SEQ ID NO: 62 - protein, 8 aa, Artificial Sequence
  Description of Artificial Sequence: Synthetic peptide
RGEGAMDY

SEQ ID NO: 63 - protein, 10 aa, Artificial Sequence
  Description of Artificial Sequence: Synthetic peptide
RASSSVNYIY

SEQ ID NO: 64 - protein, 7 aa, Artificial Sequence
  Description of Artificial Sequence: Synthetic peptide
YTSNLAP

SEQ ID NO: 65 - protein, 9 aa, Artificial Sequence
  Description of Artificial Sequence: Synthetic peptide
QQFTSSPFT

SEQ ID NO: 66 - protein, 10 aa, Artificial Sequence
  Description of Artificial Sequence: Synthetic peptide
RASSSVNYIY

SEQ ID NO: 67 - protein, 7 aa, Artificial Sequence
  Description of Artificial Sequence: Synthetic peptide
YTSNLAP

SEQ ID NO: 68 - protein, 9 aa, Artificial Sequence
  Description of Artificial Sequence: Synthetic peptide
QQFTSSPFT

SEQ ID NO: 69 - protein, 592 aa, Artificial Sequence
  Description of Artificial Sequence: Synthetic polypeptide
METDTLLLWVLLLWVPGSTGQVQLVQSGAEVKKPGSSVKVSCKASGYSFTTYYIHWVRQAPGQGLEWMGWFFPGSGNIKYNEKFKGRVTITADTSTSTAYMELSSLRSEDTAVYYCAGSYYSYDVLDYWGQGTTVTVSSGSASAPTLFPLVSCENSPSDTSSVAVGCLAQDFLPDSITFSWKYKNNSDISSTRGFPSVLRGGKYAATSQVLLPSKDVMQGTDEHVVCKVQHPNGNKEKNVPLPVIAELPPKVSVFVPPRDGFFGNPRKSKLICQATGFSPRQIQVSWLREGKQVGSGVTTDQVQAEAKESGPTTYKVTSTLTIKESDWLGQSMFTCRVDHRGLTFQQNASSMCVPDQDTAIRVFAIPPSFASIFLTKSTKLTCLVTDLTTYDSVTISWTRQNGEAVKTHTNISESHPNATFSAVGEASICEDDWNSGERFTCTVTHTDLASSLKQTISRPKGVALHRPDVYLLPPAREQLNLRESATITCLVTGFSPADVFVQWMQRGQPLSPEKYVTSAPMPEPQAPGRYFAHSILTVSEEEWNTGETYTCVVAHEALPNRVTERTVDKSTGKPTLYNVSLVMSDTAGTCY

SEQ ID NO: 70 - protein, 492 aa, Artificial Sequence
  Description of Artificial Sequence: Synthetic polypeptide
METDTLLLWVLLLWVPGSTGQVQLVQSGAEVKKPGSSVKVSCKASGYSFTTYYIHWVRQAPGQGLEWMGWFFPGSGNIKYNEKFKGRVTITADTSTSTAYMELSSLRSEDTAVYYCAGSYYSYDVLDYWGQGTTVTVSSASPTSPKVFPLSLCSTQPDGNVVIACLVQGFFPQEPLSVTWSESGQGVTARNFPPSQDASGDLYTTSSQLTLPATQCLAGKSVTCHVKHYTNPSQDVTVPCPVPSTPPTPSPSTPPTPSPSCCHPRLSLHRPALEDLLLGSEANLTCTLTGLRDASGVTFTWTPSSGKSAVQGPPERDLCGCYSVSSVLPGCAEPWNHGKTFTCTAAYPESKTPLTATLSKSGNTFRPEVHLLPPPSEELALNELVTLTCLARGFSPKDVLVRWLQGSQELPREKYLTWASRQEPSQGTTTFAVTSILRVAAEDWKKGDTFSCMVGHEALPLAFTQKTIDRLAGKPTHVNVSVVMAEVDGTCY

SEQ ID NO: 71 - protein, 479 aa, Artificial Sequence
  Description of Artificial Sequence: Synthetic polypeptide
METDTLLLWVLLLWVPGSTGQVQLVQSGAEVKKPGSSVKVSCKASGYSFTTYYIHWVRQAPGQGLEWMGWFFPGSGNIKYNEKFKGRVTITADTSTSTAYMELSSLRSEDTAVYYCAGSYYSYDVLDYWGQGTTVTVSSASPTSPKVFPLSLDSTPQDGNVVVACLVQGFFPQEPLSVTWSESGQNVTARNFPPSQDASGDLYTTSSQLTLPATQCPDGKSVTCHVKHYTNSSQDVTVPCRVPPPPPCCHPRLSLHRPALEDLLLGSEANLTCTLTGLRDASGATFTWTPSSGKSAVQGPPERDLCGCYSVSSVLPGCAQPWNHGETFTCTAAHPELKTPLTANITKSGNTFRPEVHLLPPPSEELALNELVTLTCLARGFSPKDVLVRWLQGSQELPREKYLTWASRQEPSQGTTTYAVTSILRVAAEDWKKGETFSCMVGHEALPLAFTQKTIDRMAGKPTHINVSVVMAEADGTCY

SEQ ID NO: 72 - protein, 234 aa, Artificial Sequence
  Description of Artificial Sequence: Synthetic polypeptide
METDTLLLWVLLLWVPGSTGDIQMTQSPSFLSASVGDRVTITCKASQNVGINVVWHQQKPGKAPKALIYSSSHRYSGVPSRFSGSGSGTEFTLTISSLQPEDFATYFCQQFKSYPLTFGQGTKLEIKRTVAAPSVFIFPPSDEQLKSGTASVVCLLNNFYPREAKVQWKVDNALQSGNSQESVTEQDSKDSTYSLSSTLTLSKADYEKHKVYACEVTHQGLSSPVTKSFNRGEC

SEQ ID NO: 73 - protein, 453 aa, Artificial Sequence
  Description of Artificial Sequence: Synthetic polypeptide
GSASAPTLFPLVSCENSPSDTSSVAVGCLAQDFLPDSITFSWKYKNNSDISSTRGFPSVLRGGKYAATSQVLLPSKDVMQGTDEHVVCKVQHPNGNKEKNVPLPVIAELPPKVSVFVPPRDGFFGNPRKSKLICQATGFSPRQIQVSWLREGKQVGSGVTTDQVQAEAKESGPTTYKVTSTLTIKESDWLGQSMFTCRVDHRGLTFQQNASSMCVPDQDTAIRVFAIPPSFASIFLTKSTKLTCLVTDLTTYDSVTISWTRQNGEAVKTHTNISESHPNATFSAVGEASICEDDWNSGERFTCTVTHTDLASSLKQTISRPKGVALHRPDVYLLPPAREQLNLRESATITCLVTGFSPADVFVQWMQRGQPLSPEKYVTSAPMPEPQAPGRYFAHSILTVSEEEWNTGETYTCVVAHEALPNRVTERTVDKSTGKPTLYNVSLVMSDTAGTCY

SEQ ID NO: 74 - protein, 353 aa, Homo sapiens
ASPTSPKVFPLSLCSTQPDGNVVIACLVQGFFPQEPLSVTWSESGQGVTARNFPPSQDASGDLYTTSSQLTLPATQCLAGKSVTCHVKHYTNPSQDVTVPCPVPSTPPTPSPSTPPTPSPSCCHPRLSLHRPALEDLLLGSEANLTCTLTGLRDASGVTFTWTPSSGKSAVQGPPERDLCGCYSVSSVLPGCAEPWNHGKTFTCTAAYPESKTPLTATLSKSGNTFRPEVHLLPPPSEELALNELVTLTCLARGFSPKDVLVRWLQGSQELPREKYLTWASRQEPSQGTTTFAVTSILRVAAEDWKKGDTFSCMVGHEALPLAFTQKTIDRLAGKPTHVNVSVVMAEVDGTCY

SEQ ID NO: 75 - protein, 340 aa, Homo sapiens
ASPTSPKVFPLSLDSTPQDGNVVVACLVQGFFPQEPLSVTWSESGQNVTARNFPPSQDASGDLYTTSSQLTLPATQCPDGKSVTCHVKHYTNSSQDVTVPCRVPPPPPCCHPRLSLHRPALEDLLLGSEANLTCTLTGLRDASGATFTWTPSSGKSAVQGPPERDLCGCYSVSSVLPGCAQPWNHGETFTCTAAHPELKTPLTANITKSGNTFRPEVHLLPPPSEELALNELVTLTCLARGFSPKDVLVRWLQGSQELPREKYLTWASRQEPSQGTTTYAVTSILRVAAEDWKKGETFSCMVGHEALPLAFTQKTIDRMAGKPTHINVSVVMAEADGTCY

SEQ ID NO: 76 - protein, 159 aa, Homo sapiens
MKNHLLFWGVLAVFIKAVHVKAQEDERIVLVDNKCKCARITSRIIRSSEDPNEDIVERNIRIIVPLNNRENISDPTSPLRTRFVYHLSDLCKKCDPTEVELDNQIVTATQSNICDEDSATETCYTYDRNKCYTAVVPLVYGGETKMVETALTPDACYPD

SEQ ID NO: 77-79 - skipped (3 entries)

SEQ ID NO: 80 - protein, 246 aa, Artificial Sequence
  Description of Artificial Sequence: Synthetic polypeptide
QVQLVQSGAEVKKPGSSVKVSCKASGTDFKLTYIHWVRQAPGQGLEWMGRVSPGSGNTKYNEKFKGRVTITADTSTSTAYMELSSLRSEDTAVYYCAGSYYSYDVLDYWGQGTTVTVSSGGGGSGGGGSGGGGSGGGGSDIQMTQSPSFLSASVGDRVTITCKASQNVEDRVAWYQQKPGKAPKALIYSSSHRYKGVPSRFSGSGSGTEFTLTISSLQPEDFATYFCQQFKSYPLTFGQGTKLEIK

SEQ ID NO: 81 - protein, 107 aa, Artificial Sequence
  Description of Artificial Sequence: Synthetic polypeptide
DIQMTQSPSFLSASVGDRVTITCKASQNVEDRVAWYQQKPGKAPKALIYSSSHRYKGVPSRFSGSGSGTEFTLTISSLQPEDFATYFCQQFKSYPLTFGQGTKLEIK

SEQ ID NO: 82 - protein, 119 aa, Artificial Sequence
  Description of Artificial Sequence: Synthetic polypeptide
QVQLVQSGAEVKKPGSSVKVSCKASGTDFKLTYIHWVRQAPGQGLEWMGRVSPGSGNTKYNEKFKGRVTITADTSTSTAYMELSSLRSEDTAVYYCAGSYYSYDVLDYWGQGTTVTVSS

SEQ ID NO: 83 - protein, 246 aa, Artificial Sequence
  Description of Artificial Sequence: Synthetic polypeptide
QVQLVQSGAEVKKPGSSVKVSCKASGTDFDKIYIHWVRQAPGQGLEWMGRISAGSGNVKYNEKFKGRVTITADTSTSTAYMELSSLRSEDTAVYYCAGSYYSYDVLDYWGQGTTVTVSSGGGGSGGGGSGGGGSGGGGSDIQMTQSPSFLSASVGDRVTITCKASQNVEDRVAWYQQKPGKAPKALIYSSSHRYKGVPSRFSGSGSGTEFTLTISSLQPEDFATYFCQQFKSYPLTFGQGTKLEIK

SEQ ID NO: 84 - protein, 107 aa, Artificial Sequence; identical to SEQ ID NO: 81
  Description of Artificial Sequence: Synthetic polypeptide

SEQ ID NO: 85 - protein, 119 aa, Artificial Sequence
  Description of Artificial Sequence: Synthetic polypeptide
QVQLVQSGAEVKKPGSSVKVSCKASGTDFDKIYIHWVRQAPGQGLEWMGRISAGSGNVKYNEKFKGRVTITADTSTSTAYMELSSLRSEDTAVYYCAGSYYSYDVLDYWGQGTTVTVSS

SEQ ID NO: 86 - protein, 246 aa, Artificial Sequence
  Description of Artificial Sequence: Synthetic polypeptide
QVQLVQSGAEVKKPGSSVKVSCKASGHDFRDFYIHWVRQAPGQGLEWMGRVYPGSGSYRYNEKFKGRVTITADTSTSTAYMELSSLRSEDTAVYYCAGSYYSYDVLDYWGQGTTVTVSSGGGGSGGGGSGGGGSGGGGSDIQMTQSPSFLSASVGDRVTITCKASQNVDDRVAWYQQKPGKAPKALIYSSSHRYKGVPSRFSGSGSGTEFTLTISSLQPEDFATYFCQQFKSYPLTFGQGTKLEIK

SEQ ID NO: 87 - protein, 107 aa, Artificial Sequence
  Description of Artificial Sequence: Synthetic polypeptide
DIQMTQSPSFLSASVGDRVTITCKASQNVDDRVAWYQQKPGKAPKALIYSSSHRYKGVPSRFSGSGSGTEFTLTISSLQPEDFATYFCQQFKSYPLTFGQGTKLEIK

SEQ ID NO: 88 - protein, 119 aa, Artificial Sequence
  Description of Artificial Sequence: Synthetic polypeptide
QVQLVQSGAEVKKPGSSVKVSCKASGHDFRDFYIHWVRQAPGQGLEWMGRVYPGSGSYRYNEKFKGRVTITADTSTSTAYMELSSLRSEDTAVYYCAGSYYSYDVLDYWGQGTTVTVSS

SEQ ID NO: 89 - protein, 246 aa, Artificial Sequence
  Description of Artificial Sequence: Synthetic polypeptide
QVQLVQSGAEVKKPGSSVKVSCKASGHDFKLTYIHWVRQAPGQGLEWMGRISAGSGNVKYNEKFKGRVTITADTSTSTAYMELSSLRSEDTAVYYCAGSYYSYDVLDYWGQGTTVTVSSGGGGSGGGGSGGGGSGGGGSDIQMTQSPSFLSASVGDRVTITCKASQNVDNRVAWYQQKPGKAPKALIYSSSHRYKGVPSRFSGSGSGTEFTLTISSLQPEDFATYFCQQFKSYPLTFGQGTKLEIK

SEQ ID NO: 90 - protein, 107 aa, Artificial Sequence
  Description of Artificial Sequence: Synthetic polypeptide
DIQMTQSPSFLSASVGDRVTITCKASQNVDNRVAWYQQKPGKAPKALIYSSSHRYKGVPSRFSGSGSGTEFTLTISSLQPEDFATYFCQQFKSYPLTFGQGTKLEIK

SEQ ID NO: 91 - protein, 119 aa, Artificial Sequence
  Description of Artificial Sequence: Synthetic polypeptide
QVQLVQSGAEVKKPGSSVKVSCKASGHDFKLTYIHWVRQAPGQGLEWMGRISAGSGNVKYNEKFKGRVTITADTSTSTAYMELSSLRSEDTAVYYCAGSYYSYDVLDYWGQGTTVTVSS

SEQ ID NO: 92 - protein, 246 aa, Artificial Sequence
  Description of Artificial Sequence: Synthetic polypeptide
QVQLVQSGAEVKKPGSSVKVSCKASGTDFKLTYIHWVRQAPGQGLEWMGRIFPGSGNVKYNEKFKGRVTITADTSTSTAYMELSSLRSEDTAVYYCAGSYYSYDVLDYWGQGTTVTVSSGGGGSGGGGSGGGGSGGGGSDIQMTQSPSFLSASVGDRVTITCKASQNVENKVAWHQQKPGKAPKALIYSSSHRYKGVPSRFSGSGSGTEFTLTISSLQPEDFATYFCQQFKSYPLTFGQGTKLEIK

SEQ ID NO: 93 - protein, 107 aa, Artificial Sequence
  Description of Artificial Sequence: Synthetic polypeptide
DIQMTQSPSFLSASVGDRVTITCKASQNVENKVAWHQQKPGKAPKALIYSSSHRYKGVPSRFSGSGSGTEFTLTISSLQPEDFATYFCQQFKSYPLTFGQGTKLEIK

SEQ ID NO: 94 - protein, 119 aa, Artificial Sequence
  Description of Artificial Sequence: Synthetic polypeptide
QVQLVQSGAEVKKPGSSVKVSCKASGTDFKLTYIHWVRQAPGQGLEWMGRIFPGSGNVKYNEKFKGRVTITADTSTSTAYMELSSLRSEDTAVYYCAGSYYSYDVLDYWGQGTTVTVSS

SEQ ID NO: 95 - protein, 246 aa, Artificial Sequence
  Description of Artificial Sequence: Synthetic polypeptide
QVQLVQSGAEVKKPGSSVKVSCKASGTDFDKIYIHWVRQAPGQGLEWMGRIFAGSGNTKYNEKFKGRVTITADTSTSTAYMELSSLRSEDTAVYYCAGSYYSYDVLDYWGQGTTVTVSSGGGGSGGGGSGGGGSGGGGSDIQMTQSPSFLSASVGDRVTITCKASQNVDDRVAWYQQKPGKAPKALIYSSSHRYKGVPSRFSGSGSGTEFTLTISSLQPEDFATYFCQQFKSYPLTFGQGTKLEIK

SEQ ID NO: 96 - protein, 107 aa, Artificial Sequence; identical to SEQ ID NO: 87
  Description of Artificial Sequence: Synthetic polypeptide

SEQ ID NO: 97 - protein, 119 aa, Artificial Sequence
  Description of Artificial Sequence: Synthetic polypeptide
QVQLVQSGAEVKKPGSSVKVSCKASGTDFDKIYIHWVRQAPGQGLEWMGRIFAGSGNTKYNEKFKGRVTITADTSTSTAYMELSSLRSEDTAVYYCAGSYYSYDVLDYWGQGTTVTVSS

SEQ ID NO: 98 - protein, 246 aa, Artificial Sequence
  Description of Artificial Sequence: Synthetic polypeptide
QVQLVQSGAEVKKPGSSVKVSCKASGHDFDKFYIHWVRQAPGQGLEWMGRVSAGSGNVKYNEKFKGRVTITADTSTSTAYMELSSLRSEDTAVYYCAGSYYSYDVLDYWGQGTTVTVSSGGGGSGGGGSGGGGSGGGGSDIQMTQSPSFLSASVGDRVTITCKASQNVGNRVAWYQQKPGKAPKALIYSSSHRYSGVPSRFSGSGSGTEFTLTISSLQPEDFATYFCQQFKSYPLTFGQGTKLEIK

SEQ ID NO: 99 - protein, 107 aa, Artificial Sequence
  Description of Artificial Sequence: Synthetic polypeptide
DIQMTQSPSFLSASVGDRVTITCKASQNVGNRVAWYQQKPGKAPKALIYSSSHRYSGVPSRFSGSGSGTEFTLTISSLQPEDFATYFCQQFKSYPLTFGQGTKLEIK

SEQ ID NO: 100 - protein, 119 aa, Artificial Sequence
  Description of Artificial Sequence: Synthetic polypeptide
QVQLVQSGAEVKKPGSSVKVSCKASGHDFDKFYIHWVRQAPGQGLEWMGRVSAGSGNVKYNEKFKGRVTITADTSTSTAYMELSSLRSEDTAVYYCAGSYYSYDVLDYWGQGTTVTVSS

SEQ ID NO: 101 - protein, 247 aa, Artificial Sequence
  Description of Artificial Sequence: Synthetic polypeptide
QVQLVQSGAEVKKPGSSVKVSCKASGHDFDKFYIHWVRQAPGQGLEWMGRIFAGSGNVKYNEKFKGRVTITADTSTSTAYMELSSLRSEDTAVYYCAGSYYSYDVLDYWGQGTTVTVSSGGGGSGGGGSGGGGSGGGGSDIQMTQSPSFLSASVGDRVTITCKASQNVGDRVAWYQQKPGKAPKALIYSSSHRYKGVPSRFSGSGSGTEFTLTISSLQPEDFATYFCQQFKSYPLTFGQGTKLEIKS

SEQ ID NO: 102 - protein, 107 aa, Artificial Sequence
  Description of Artificial Sequence: Synthetic polypeptide
DIQMTQSPSFLSASVGDRVTITCKASQNVGDRVAWYQQKPGKAPKALIYSSSHRYKGVPSRFSGSGSGTEFTLTISSLQPEDFATYFCQQFKSYPLTFGQGTKLEIK

SEQ ID NO: 103 - protein, 119 aa, Artificial Sequence
  Description of Artificial Sequence: Synthetic polypeptide
QVQLVQSGAEVKKPGSSVKVSCKASGHDFDKFYIHWVRQAPGQGLEWMGRIFAGSGNVKYNEKFKGRVTITADTSTSTAYMELSSLRSEDTAVYYCAGSYYSYDVLDYWGQGTTVTVSS

SEQ ID NO: 104 - protein, 246 aa, Artificial Sequence
  Description of Artificial Sequence: Synthetic polypeptide
QVQLVQSGAEVKKPGSSVKVSCKASGTDFKLTYIHWVRQAPGQGLEWMGRVSPGSGNVKYNEKFKGRVTITADTSTSTAYMELSSLRSEDTAVYYCAGSYYSYDVLDYWGQGTTVTVSSGGGGSGGGGSGGGGSGGGGSDIQMTQSPSFLSASVGDRVTITCKASQNVGDRVAWYQQKPGKAPKALIYSSSHRYKGVPSRFSGSGSGTEFTLTISSLQPEDFATYFCQQFKSYPLTFGQGTKLEIK

SEQ ID NO: 105 - protein, 107 aa, Artificial Sequence; identical to SEQ ID NO: 102
  Description of Artificial Sequence: Synthetic polypeptide

SEQ ID NO: 106 - protein, 119 aa, Artificial Sequence
  Description of Artificial Sequence: Synthetic polypeptide
QVQLVQSGAEVKKPGSSVKVSCKASGTDFKLTYIHWVRQAPGQGLEWMGRVSPGSGNVKYNEKFKGRVTITADTSTSTAYMELSSLRSEDTAVYYCAGSYYSYDVLDYWGQGTTVTVSS

SEQ ID NO: 107 - protein, 246 aa, Artificial Sequence
  Description of Artificial Sequence: Synthetic polypeptide
QVQLVQSGAEVKKPGSSVKVSCKASGTDFDKIYIHWVRQAPGQGLEWMGRVSAGSGNTKYNEKFKGRVTITADTSTSTAYMELSSLRSEDTAVYYCAGSYYSYDVLDYWGQGTTVTVSSGGGGSGGGGSGGGGSGGGGSDIQMTQSPSFLSASVGDRVTITCKASQNVGNRVAWYQQKPGKAPKALIYSSSHRYKGVPSRFSGSGSGTEFTLTISSLQPEDFATYFCQQFKSYPLTFGQGTKLEIK

SEQ ID NO: 108 - protein, 107 aa, Artificial Sequence
  Description of Artificial Sequence: Synthetic polypeptide
DIQMTQSPSFLSASVGDRVTITCKASQNVGNRVAWYQQKPGKAPKALIYSSSHRYKGVPSRFSGSGSGTEFTLTISSLQPEDFATYFCQQFKSYPLTFGQGTKLEIK

SEQ ID NO: 109 - protein, 119 aa, Artificial Sequence
  Description of Artificial Sequence: Synthetic polypeptide
QVQLVQSGAEVKKPGSSVKVSCKASGTDFDKIYIHWVRQAPGQGLEWMGRVSAGSGNTKYNEKFKGRVTITADTSTSTAYMELSSLRSEDTAVYYCAGSYYSYDVLDYWGQGTTVTVSS

SEQ ID NO: 110 - protein, 246 aa, Artificial Sequence
  Description of Artificial Sequence: Synthetic polypeptide
QVQLVQSGAEVKKPGSSVKVSCKASGTDFKLTYIHWVRQAPGQGLEWMGRIFPGSGNVKYNEKFKGRVTITADTSTSTAYMELSSLRSEDTAVYYCAGSYYSYDVLDYWGQGTTVTVSSGGGGSGGGGSGGGGSGGGGSDIQMTQSPSFLSASVGDRVTITCKASQNVDNRVAWYQQKPGKAPKALIYSSSHRYKGVPSRFSGSGSGTEFTLTISSLQPEDFATYFCQQFKSYPLTFGQGTKLEIK

SEQ ID NO: 111 - protein, 107 aa, Artificial Sequence; identical to SEQ ID NO: 90
  Description of Artificial Sequence: Synthetic polypeptide

SEQ ID NO: 112 - protein, 119 aa, Artificial Sequence; identical to SEQ ID NO: 94
  Description of Artificial Sequence: Synthetic polypeptide

SEQ ID NO: 113 - protein, 246 aa, Artificial Sequence
  Description of Artificial Sequence: Synthetic polypeptide
QVQLVQSGAEVKKPGSSVKVSCKASGTDFDKIYIHWVRQAPGQGLEWMGRISAGSGNTKYNEKFKGRVTITADTSTSTAYMELSSLRSEDTAVYYCAGSYYSYDVLDYWGQGTTVTVSSGGGGSGGGGSGGGGSGGGGSDIQMTQSPSFLSASVGDRVTITCKASQNVDDRVAWYQQKPGKAPKALIYSSSHRYKGVPSRFSGSGSGTEFTLTISSLQPEDFATYFCQQFKSYPLTFGQGTKLEIK

SEQ ID NO: 114 - protein, 107 aa, Artificial Sequence; identical to SEQ ID NO: 87
  Description of Artificial Sequence: Synthetic polypeptide

SEQ ID NO: 115 - protein, 119 aa, Artificial Sequence
  Description of Artificial Sequence: Synthetic polypeptide
QVQLVQSGAEVKKPGSSVKVSCKASGTDFDKIYIHWVRQAPGQGLEWMGRISAGSGNTKYNEKFKGRVTITADTSTSTAYMELSSLRSEDTAVYYCAGSYYSYDVLDYWGQGTTVTVSS

SEQ ID NO: 116 - protein, 246 aa, Artificial Sequence
  Description of Artificial Sequence: Synthetic polypeptide
QVQLVQSGAEVKKPGSSVKVSCKASGTDFRLTYIHWVRQAPGQGLEWMGRVSPGSGNTKYNEKFKGRVTITADTSTSTAYMELSSLRSEDTAVYYCAGSYYSYDVLDYWGQGTTVTVSSGGGGSGGGGSGGGGSGGGGSDIQMTQSPSFLSASVGDRVTITCKASQNVDNKVAWHQQKPGKAPKALIYSSSHRYKGVPSRFSGSGSGTEFTLTISSLQPEDFATYFCQQFKSYPLTFGQGTKLEIK

SEQ ID NO: 117 - protein, 107 aa, Artificial Sequence
  Description of Artificial Sequence: Synthetic polypeptide
DIQMTQSPSFLSASVGDRVTITCKASQNVDNKVAWHQQKPGKAPKALIYSSSHRYKGVPSRFSGSGSGTEFTLTISSLQPEDFATYFCQQFKSYPLTFGQGTKLEIK

SEQ ID NO: 118 - protein, 119 aa, Artificial Sequence
  Description of Artificial Sequence: Synthetic polypeptide
QVQLVQSGAEVKKPGSSVKVSCKASGTDFRLTYIHWVRQAPGQGLEWMGRVSPGSGNTKYNEKFKGRVTITADTSTSTAYMELSSLRSEDTAVYYCAGSYYSYDVLDYWGQGTTVTVSS

SEQ ID NO: 119 - protein, 246 aa, Artificial Sequence
  Description of Artificial Sequence: Synthetic polypeptide
QVQLVQSGAEVKKPGSSVKVSCKASGGTFRLTYIHWVRQAPGQGLEWMGRVYPGSGNTKYNEKFKGRVTITADTSTSTAYMELSSLRSEDTAVYYCAGSYYSYDVLDYWGQGTTVTVSSGGGGSGGGGSGGGGSGGGGSDIQMTQSPSFLSASVGDRVTITCKASQNVDDRVAWYQQKPGKAPKALIYSSSHRYKGVPSRFSGSGSGTEFTLTISSLQPEDFATYFCQQFKSYPLTFGQGTKLEIK

SEQ ID NO: 120 - protein, 107 aa, Artificial Sequence; identical to SEQ ID NO: 87
  Description of Artificial Sequence: Synthetic polypeptide

SEQ ID NO: 121 - protein, 119 aa, Artificial Sequence
  Description of Artificial Sequence: Synthetic polypeptide
QVQLVQSGAEVKKPGSSVKVSCKASGGTFRLTYIHWVRQAPGQGLEWMGRVYPGSGNTKYNEKFKGRVTITADTSTSTAYMELSSLRSEDTAVYYCAGSYYSYDVLDYWGQGTTVTVSS

SEQ ID NO: 122 - protein, 246 aa, Artificial Sequence
  Description of Artificial Sequence: Synthetic polypeptide
QVQLVQSGAEVKKPGSSVKVSCKASGTDFRLTYIHWVRQAPGQGLEWMGRIFPGSGNTKYNEKFKGRVTITADTSTSTAYMELSSLRSEDTAVYYCAGSYYSYDVLDYWGQGTTVTVSSGGGGSGGGGSGGGGSGGGGSDIQMTQSPSFLSASVGDRVTITCKASQNVDDRVAWYQQKPGKAPKALIYSSSHRYKGVPSRFSGSGSGTEFTLTISSLQPEDFATYFCQQFKSYPLTFGQGTKLEIK

SEQ ID NO: 123 - protein, 107 aa, Artificial Sequence; identical to SEQ ID NO: 87
  Description of Artificial Sequence: Synthetic polypeptide

SEQ ID NO: 124 - protein, 119 aa, Artificial Sequence
  Description of Artificial Sequence: Synthetic polypeptide
QVQLVQSGAEVKKPGSSVKVSCKASGTDFRLTYIHWVRQAPGQGLEWMGRIFPGSGNTKYNEKFKGRVTITADTSTSTAYMELSSLRSEDTAVYYCAGSYYSYDVLDYWGQGTTVTVSS

SEQ ID NO: 125 - protein, 246 aa, Artificial Sequence
  Description of Artificial Sequence: Synthetic polypeptide
QVQLVQSGAEVKKPGSSVKVSCKASGTDFKLTYIHWVRQAPGQGLEWMGRIFPGSGNVKYNEKFKGRVTITADTSTSTAYMELSSLRSEDTAVYYCAGSYYSYDVLDYWGQGTTVTVSSGGGGSGGGGSGGGGSGGGGSDIQMTQSPSFLSASVGDRVTITCKASQNVEDRVAWYQQKPGKAPKALIYSSSHRYKGVPSRFSGSGSGTEFTLTISSLQPEDFATYFCQQFKSYPLTFGQGTKLEIK

SEQ ID NO: 126 - protein, 107 aa, Artificial Sequence; identical to SEQ ID NO: 81
  Description of Artificial Sequence: Synthetic polypeptide

SEQ ID NO: 127 - protein, 119 aa, Artificial Sequence; identical to SEQ ID NO: 94
  Description of Artificial Sequence: Synthetic polypeptide

SEQ ID NO: 128 - protein, 246 aa, Artificial Sequence
  Description of Artificial Sequence: Synthetic polypeptide
QVQLVQSGAEVKKPGSSVKVSCKASGGTFRLTYIHWVRQAPGQGLEWMGRISAGSGNVKYNEKFKGRVTITADTSTSTAYMELSSLRSEDTAVYYCAGSYYSYDVLDYWGQGTTVTVSSGGGGSGGGGSGGGGSGGGGSDIQMTQSPSFLSASVGDRVTITCKASQNVGDRVAWYQQKPGKAPKALIYSSSHRYKGVPSRFSGSGSGTEFTLTISSLQPEDFATYFCQQFKSYPLTFGQGTKLEIK

SEQ ID NO: 129 - protein, 107 aa, Artificial Sequence; identical to SEQ ID NO: 102
  Description of Artificial Sequence: Synthetic polypeptide

SEQ ID NO: 130 - protein, 119 aa, Artificial Sequence
  Description of Artificial Sequence: Synthetic polypeptide
QVQLVQSGAEVKKPGSSVKVSCKASGGTFRLTYIHWVRQAPGQGLEWMGRISAGSGNVKYNEKFKGRVTITADTSTSTAYMELSSLRSEDTAVYYCAGSYYSYDVLDYWGQGTTVTVSS

SEQ ID NO: 131 - protein, 246 aa, Artificial Sequence
  Description of Artificial Sequence: Synthetic polypeptide
QVQLVQSGAEVKKPGSSVKVSCKASGGTFDKTYIHWVRQAPGQGLEWMGRISAGSGNTKYNEKFKGRVTITADTSTSTAYMELSSLRSEDTAVYYCAGSYYSYDVLDYWGQGTTVTVSSGGGGSGGGGSGGGGSGGGGSDIQMTQSPSFLSASVGDRVTITCKASQNVDDRVAWYQQKPGKAPKALIYSSSHRYKGVPSRFSGSGSGTEFTLTISSLQPEDFATYFCQQFKSYPLTFGQGTKLEIK

SEQ ID NO: 132 - protein, 107 aa, Artificial Sequence; identical to SEQ ID NO: 87
  Description of Artificial Sequence: Synthetic polypeptide

SEQ ID NO: 133 - protein, 119 aa, Artificial Sequence
  Description of Artificial Sequence: Synthetic polypeptide
QVQLVQSGAEVKKPGSSVKVSCKASGGTFDKTYIHWVRQAPGQGLEWMGRISAGSGNTKYNEKFKGRVTITADTSTSTAYMELSSLRSEDTAVYYCAGSYYSYDVLDYWGQGTTVTVSS

SEQ ID NO: 134 - protein, 246 aa, Artificial Sequence
  Description of Artificial Sequence: Synthetic polypeptide
QVQLVQSGAEVKKPGSSVKVSCKASGHDFDKFYIHWVRQAPGQGLEWMGRISAGSGNTKYNEKFKGRVTITADTSTSTAYMELSSLRSEDTAVYYCAGSYYSYDVLDYWGQGTTVTVSSGGGGSGGGGSGGGGSGGGGSDIQMTQSPSFLSASVGDRVTITCKASQNVDDRVAWYQQKPGKAPKALIYSSSHRYKGVPSRFSGSGSGTEFTLTISSLQPEDFATYFCQQFKSYPLTFGQGTKLEIK

SEQ ID NO: 135 - protein, 107 aa, Artificial Sequence; identical to SEQ ID NO: 87
  Description of Artificial Sequence: Synthetic polypeptide

SEQ ID NO: 136 - protein, 119 aa, Artificial Sequence
  Description of Artificial Sequence: Synthetic polypeptide
QVQLVQSGAEVKKPGSSVKVSCKASGHDFDKFYIHWVRQAPGQGLEWMGRISAGSGNTKYNEKFKGRVTITADTSTSTAYMELSSLRSEDTAVYYCAGSYYSYDVLDYWGQGTTVTVSS

SEQ ID NO: 137 - protein, 246 aa, Artificial Sequence
  Description of Artificial Sequence: Synthetic polypeptide
QVQLVQSGAEVKKPGSSVKVSCKASGTDFKLTYIHWVRQAPGQGLEWMGRISAGSGNVKYNEKFKGRVTITADTSTSTAYMELSSLRSEDTAVYYCAGSYYSYDVLDYWGQGTTVTVSSGGGGSGGGGSGGGGSGGGGSDIQMTQSPSFLSASVGDRVTITCKASQNVDNKVAWHQQKPGKAPKALIYSSSHRYKGVPSRFSGSGSGTEFTLTISSLQPEDFATYFCQQFKSYPLTFGQGTKLEIK

SEQ ID NO: 138 - protein, 107 aa, Artificial Sequence; identical to SEQ ID NO: 117
  Description of Artificial Sequence: Synthetic polypeptide

SEQ ID NO: 139 - protein, 119 aa, Artificial Sequence
  Description of Artificial Sequence: Synthetic polypeptide
QVQLVQSGAEVKKPGSSVKVSCKASGTDFKLTYIHWVRQAPGQGLEWMGRISAGSGNVKYNEKFKGRVTITADTSTSTAYMELSSLRSEDTAVYYCAGSYYSYDVLDYWGQGTTVTVSS

SEQ ID NO: 140 - protein, 246 aa, Artificial Sequence
  Description of Artificial Sequence: Synthetic polypeptide
QVQLVQSGAEVKKPGSSVKVSCKASGHDFRLTYIHWVRQAPGQGLEWMGRISAGSGNVKYNEKFKGRVTITADTSTSTAYMELSSLRSEDTAVYYCAGSYYSYDVLDYWGQGTTVTVSSGGGGSGGGGSGGGGSGGGGSDIQMTQSPSFLSASVGDRVTITCKASQNVADRVAWYQQKPGKAPKALIYSSSHRYKGVPSRFSGSGSGTEFTLTISSLQPEDFATYFCQQFKSYPLTFGQGTKLEIK

SEQ ID NO: 141 - protein, 107 aa, Artificial Sequence
  Description of Artificial Sequence: Synthetic polypeptide
DIQMTQSPSFLSASVGDRVTITCKASQNVADRVAWYQQKPGKAPKALIYSSSHRYKGVPSRFSGSGSGTEFTLTISSLQPEDFATYFCQQFKSYPLTFGQGTKLEIK

SEQ ID NO: 142 - protein, 119 aa, Artificial Sequence
  Description of Artificial Sequence: Synthetic polypeptide
QVQLVQSGAEVKKPGSSVKVSCKASGHDFRLTYIHWVRQAPGQGLEWMGRISAGSGNVKYNEKFKGRVTITADTSTSTAYMELSSLRSEDTAVYYCAGSYYSYDVLDYWGQGTTVTVSS

SEQ ID NO: 143 - protein, 246 aa, Artificial Sequence
  Description of Artificial Sequence: Synthetic polypeptide
QVQLVQSGAEVKKPGSSVKVSCKASGHDFHLWYIHWVRQAPGQGLEWMGRVSAGSGNVKYNEKFKGRVTITADTSTSTAYMELSSLRSEDTAVYYCAGSYYSYDVLDYWGQGTTVTVSSGGGGSGGGGSGGGGSGGGGSDIQMTQSPSFLSASVGDRVTITCKASQNVDNKVAWHQQKPGKAPKALIYSSSHRYKGVPSRFSGSGSGTEFTLTISSLQPEDFATYFCQQFKSYPLTFGQGTKLEIK

SEQ ID NO: 144 - protein, 107 aa, Artificial Sequence; identical to SEQ ID NO: 117
  Description of Artificial Sequence: Synthetic polypeptide

SEQ ID NO: 145 - protein, 119 aa, Artificial Sequence
  Description of Artificial Sequence: Synthetic polypeptide
QVQLVQSGAEVKKPGSSVKVSCKASGHDFHLWYIHWVRQAPGQGLEWMGRVSAGSGNVKYNEKFKGRVTITADTSTSTAYMELSSLRSEDTAVYYCAGSYYSYDVLDYWGQGTTVTVSS

SEQ ID NO: 146 - protein, 246 aa, Artificial Sequence
  Description of Artificial Sequence: Synthetic polypeptide
QVQLVQSGAEVKKPGSSVKVSCKASGHDFHLWYIHWVRQAPGQGLEWMGRVFAGSGNTKYNEKFKGRVTITADTSTSTAYMELSSLRSEDTAVYYCAGSYYSYDVLDYWGQGTTVTVSSGGGGSGGGGSGGGGSGGGGSDIQMTQSPSFLSASVGDRVTITCKASQNVEDKVAWYQQKPGKAPKALIYSSSHRYKGVPSRFSGSGSGTEFTLTISSLQPEDFATYFCQQFKSYPLTFGQGTKLEIK

SEQ ID NO: 147 - protein, 107 aa, Artificial Sequence
  Description of Artificial Sequence: Synthetic polypeptide
DIQMTQSPSFLSASVGDRVTITCKASQNVEDKVAWYQQKPGKAPKALIYSSSHRYKGVPSRFSGSGSGTEFTLTISSLQPEDFATYFCQQFKSYPLTFGQGTKLEIK

SEQ ID NO: 148 - protein, 119 aa, Artificial Sequence
  Description of Artificial Sequence: Synthetic polypeptide
QVQLVQSGAEVKKPGSSVKVSCKASGHDFHLWYIHWVRQAPGQGLEWMGRVFAGSGNTKYNEKFKGRVTITADTSTSTAYMELSSLRSEDTAVYYCAGSYYSYDVLDYWGQGTTVTVSS

SEQ ID NO: 149 - protein, 246 aa, Artificial Sequence
  Description of Artificial Sequence: Synthetic polypeptide
QVQLVQSGAEVKKPGSSVKVSCKASGTDFKLTYIHWVRQAPGQGLEWMGRIFPGSGNTKYNEKFKGRVTITADTSTSTAYMELSSLRSEDTAVYYCAGSYYSYDVLDYWGQGTTVTVSSGGGGSGGGGSGGGGSGGGGSDIQMTQSPSFLSASVGDRVTITCKASQNVDDRVAWYQQKPGKAPKALIYSSSHRYKGVPSRFSGSGSGTEFTLTISSLQPEDFATYFCQQFKSYPLTFGQGTKLEIK

SEQ ID NO: 150 - protein, 107 aa, Artificial Sequence; identical to SEQ ID NO: 87
  Description of Artificial Sequence: Synthetic polypeptide

SEQ ID NO: 151 - protein, 119 aa, Artificial Sequence
  Description of Artificial Sequence: Synthetic polypeptide
QVQLVQSGAEVKKPGSSVKVSCKASGTDFKLTYIHWVRQAPGQGLEWMGRIFPGSGNTKYNEKFKGRVTITADTSTSTAYMELSSLRSEDTAVYYCAGSYYSYDVLDYWGQGTTVTVSS

SEQ ID NO: 152 - skipped

SEQ ID NO: 153 - protein, 246 aa, Artificial Sequence
  Description of Artificial Sequence: Synthetic polypeptide
QVQLVQSGAEVKKPGSSVKVSCKASGTDFKLTYIHWVRQAPGQGLEWMGRVSAGSGNVKYNEKFKGRVTITADTSTSTAYMELSSLRSEDTAVYYCAGSYYSYDVLDYWGQGTTVTVSSGGGGSGGGGSGGGGSGGGGSDIQMTQSPSFLSASVGDRVTITCKASQNVGNRVAWYQQKPGKAPKALIYSSSHRYKGVPSRFSGSGSGTEFTLTISSLQPEDFATYFCQQFKSYPLTFGQGTKLEIK

SEQ ID NO: 154 - protein, 107 aa, Artificial Sequence; identical to SEQ ID NO: 108
  Description of Artificial Sequence: Synthetic polypeptide

SEQ ID NO: 155 - protein, 119 aa, Artificial Sequence
  Description of Artificial Sequence: Synthetic polypeptide
QVQLVQSGAEVKKPGSSVKVSCKASGTDFKLTYIHWVRQAPGQGLEWMGRVSAGSGNVKYNEKFKGRVTITADTSTSTAYMELSSLRSEDTAVYYCAGSYYSYDVLDYWGQGTTVTVSS

SEQ ID NO: 156 - protein, 246 aa, Artificial Sequence
  Description of Artificial Sequence: Synthetic polypeptide
QVQLVQSGAEVKKPGSSVKVSCKASGTDFKLTYIHWVRQAPGQGLEWMGRISPGSGNTKYNEKFKGRVTITADTSTSTAYMELSSLRSEDTAVYYCAGSYYSYDVLDYWGQGTTVTVSSGGGGSGGGGSGGGGSGGGGSDIQMTQSPSFLSASVGDRVTITCKASQNVGDRVAWYQQKPGKAPKALIYSSSHRYKGVPSRFSGSGSGTEFTLTISSLQPEDFATYFCQQFKSYPLTFGQGTKLEIK

SEQ ID NO: 157 - protein, 107 aa, Artificial Sequence; identical to SEQ ID NO: 102
  Description of Artificial Sequence: Synthetic polypeptide

SEQ ID NO: 158 - protein, 119 aa, Artificial Sequence
  Description of Artificial Sequence: Synthetic polypeptide
QVQLVQSGAEVKKPGSSVKVSCKASGTDFKLTYIHWVRQAPGQGLEWMGRISPGSGNTKYNEKFKGRVTITADTSTSTAYMELSSLRSEDTAVYYCAGSYYSYDVLDYWGQGTTVTVSS

SEQ ID NO: 159 - protein, 246 aa, Artificial Sequence
  Description of Artificial Sequence: Synthetic polypeptide
QVQLVQSGAEVKKPGSSVKVSCKASGHDFHLWYIHWVRQAPGQGLEWMGRISPGSGNVKYNEKFKGRVTITADTSTSTAYMELSSLRSEDTAVYYCAGSYYSYDVLDYWGQGTTVTVSSGGGGSGGGGSGGGGSGGGGSDIQMTQSPSFLSASVGDRVTITCKASQNVGDRVAWHQQKPGKAPKALIYSSSHRYKGVPSRFSGSGSGTEFTLTISSLQPEDFATYFCQQFKSYPLTFGQGTKLEIK

SEQ ID NO: 160 - protein, 107 aa, Artificial Sequence
  Description of Artificial Sequence: Synthetic polypeptide
DIQMTQSPSFLSASVGDRVTITCKASQNVGDRVAWHQQKPGKAPKALIYSSSHRYKGVPSRFSGSGSGTEFTLTISSLQPEDFATYFCQQFKSYPLTFGQGTKLEIK

SEQ ID NO: 161 - protein, 119 aa, Artificial Sequence
  Description of Artificial Sequence: Synthetic polypeptide
QVQLVQSGAEVKKPGSSVKVSCKASGHDFHLWYIHWVRQAPGQGLEWMGRISPGSGNVKYNEKFKGRVTITADTSTSTAYMELSSLRSEDTAVYYCAGSYYSYDVLDYWGQGTTVTVSS

SEQ ID NO: 162 - protein, 246 aa, Artificial Sequence
  Description of Artificial Sequence: Synthetic polypeptide
QVQLVQSGAEVKKPGSSVKVSCKASGHDFKLTYIHWVRQAPGQGLEWMGRISAGSGNVKYNEKFKGRVTITADTSTSTAYMELSSLRSEDTAVYYCAGSYYSYDVLDYWGQGTTVTVSSGGGGSGGGGSGGGGSGGGGSDIQMTQSPSFLSASVGDRVTITCKASQNVDDRVAWYQQKPGKAPKALIYSSSHRYKGVPSRFSGSGSGTEFTLTISSLQPEDFATYFCQQFKSYPLTFGQGTKLEIK

SEQ ID NO: 163 - protein, 107 aa, Artificial Sequence; identical to SEQ ID NO: 87
  Description of Artificial Sequence: Synthetic polypeptide

SEQ ID NO: 164 - protein, 119 aa, Artificial Sequence; identical to SEQ ID NO: 91
  Description of Artificial Sequence: Synthetic polypeptide

SEQ ID NO: 165 - protein, 246 aa, Artificial Sequence
  Description of Artificial Sequence: Synthetic polypeptide
QVQLVQSGAEVKKPGSSVKVSCKASGTDFHLWYIHWVRQAPGQGLEWMGRVFAGSGSYRYNEKFKGRVTITADTSTSTAYMELSSLRSEDTAVYYCAGSYYSYDVLDYWGQGTTVTVSSGGGGSGGGGSGGGGSGGGGSDIQMTQSPSFLSASVGDRVTITCKASQNVDDRVAWYQQKPGKAPKALIYSSSHRYKGVPSRFSGSGSGTEFTLTISSLQPEDFATYFCQQFKSYPLTFGQGTKLEIK

SEQ ID NO: 166 - protein, 107 aa, Artificial Sequence; identical to SEQ ID NO: 87
  Description of Artificial Sequence: Synthetic polypeptide

SEQ ID NO: 167 - protein, 119 aa, Artificial Sequence
  Description of Artificial Sequence: Synthetic polypeptide
QVQLVQSGAEVKKPGSSVKVSCKASGTDFHLWYIHWVRQAPGQGLEWMGRVFAGSGSYRYNEKFKGRVTITADTSTSTAYMELSSLRSEDTAVYYCAGSYYSYDVLDYWGQGTTVTVSS

SEQ ID NO: 168 - protein, 246 aa, Artificial Sequence
  Description of Artificial Sequence: Synthetic polypeptide
QVQLVQSGAEVKKPGSSVKVSCKASGTDFDKIYIHWVRQAPGQGLEWMGRISAGSGNTKYNEKFKGRVTITADTSTSTAYMELSSLRSEDTAVYYCAGSYYSYDVLDYWGQGTTVTVSSGGGGSGGGGSGGGGSGGGGSDIQMTQSPSFLSASVGDRVTITCKASQNVADRVAWYQQKPGKAPKALIYSSSHRYKGVPSRFSGSGSGTEFTLTISSLQPEDFATYFCQQFKSYPLTFGQGTKLEIK

SEQ ID NO: 169 - protein, 107 aa, Artificial Sequence; identical to SEQ ID NO: 141
  Description of Artificial Sequence: Synthetic polypeptide

SEQ ID NO: 170 - protein, 119 aa, Artificial Sequence; identical to SEQ ID NO: 115
  Description of Artificial Sequence: Synthetic polypeptide

SEQ ID NO: 171 - protein, 246 aa, Artificial Sequence
  Description of Artificial Sequence: Synthetic polypeptide
QVQLVQSGAEVKKPGSSVKVSCKASGTDFKLTYIHWVRQAPGQGLEWMGRISAGSGNTKYNEKFKGRVTITADTSTSTAYMELSSLRSEDTAVYYCAGSYYSYDVLDYWGQGTTVTVSSGGGGSGGGGSGGGGSGGGGSDIQMTQSPSFLSASVGDRVTITCKASQNVEDRVAWYQQKPGKAPKALIYSSSHRYKGVPSRFSGSGSGTEFTLTISSLQPEDFATYFCQQFKSYPLTFGQGTKLEIK

SEQ ID NO: 172 - protein, 107 aa, Artificial Sequence; identical to SEQ ID NO: 81
  Description of Artificial Sequence: Synthetic polypeptide

SEQ ID NO: 173 - protein, 119 aa, Artificial Sequence
  Description of Artificial Sequence: Synthetic polypeptide
QVQLVQSGAEVKKPGSSVKVSCKASGTDFKLTYIHWVRQAPGQGLEWMGRISAGSGNTKYNEKFKGRVTITADTSTSTAYMELSSLRSEDTAVYYCAGSYYSYDVLDYWGQGTTVTVSS

SEQ ID NO: 174 - protein, 246 aa, Artificial Sequence
  Description of Artificial Sequence: Synthetic polypeptide
QVQLVQSGAEVKKPGSSVKVSCKASGTDFRLTYIHWVRQAPGQGLEWMGRISPGSGNTKYNEKFKGRVTITADTSTSTAYMELSSLRSEDTAVYYCAGSYYSYDVLDYWGQGTTVTVSSGGGGSGGGGSGGGGSGGGGSDIQMTQSPSFLSASVGDRVTITCKASQNVGNRVAWYQQKPGKAPKALIYSSSHRYKGVPSRFSGSGSGTEFTLTISSLQPEDFATYFCQQFKSYPLTFGQGTKLEIK

SEQ ID NO: 175 - protein, 107 aa, Artificial Sequence; identical to SEQ ID NO: 108
  Description of Artificial Sequence: Synthetic polypeptide

SEQ ID NO: 176 - protein, 119 aa, Artificial Sequence
  Description of Artificial Sequence: Synthetic polypeptide
QVQLVQSGAEVKKPGSSVKVSCKASGTDFRLTYIHWVRQAPGQGLEWMGRISPGSGNTKYNEKFKGRVTITADTSTSTAYMELSSLRSEDTAVYYCAGSYYSYDVLDYWGQGTTVTVSS

SEQ ID NO: 177 - protein, 246 aa, Artificial Sequence
  Description of Artificial Sequence: Synthetic polypeptide
QVQLVQSGAEVKKPGSSVKVSCKASGHDFDKTYIHWVRQAPGQGLEWMGRVSAGSGNVKYNEKFKGRVTITADTSTSTAYMELSSLRSEDTAVYYCAGSYYSYDVLDYWGQGTTVTVSSGGGGSGGGGSGGGGSGGGGSDIQMTQSPSFLSASVGDRVTITCKASQNVEDRVAWYQQKPGKAPKALIYSSSHRYKGVPSRFSGSGSGTEFTLTISSLQPEDFATYFCQQFKSYPLTFGQGTKLEIK

SEQ ID NO: 178 - protein, 107 aa, Artificial Sequence; identical to SEQ ID NO: 81
  Description of Artificial Sequence: Synthetic polypeptide

SEQ ID NO: 179 - protein, 119 aa, Artificial Sequence
  Description of Artificial Sequence: Synthetic polypeptide
QVQLVQSGAEVKKPGSSVKVSCKASGHDFDKTYIHWVRQAPGQGLEWMGRVSAGSGNVKYNEKFKGRVTITADTSTSTAYMELSSLRSEDTAVYYCAGSYYSYDVLDYWGQGTTVTVSS

SEQ ID NO: 180 - protein, 246 aa, Artificial Sequence
  Description of Artificial Sequence: Synthetic polypeptide
QVQLVQSGAEVKKPGSSVKVSCKASGHDFKLTYIHWVRQAPGQGLEWMGRVSPGSGNTKYNEKFKGRVTITADTSTSTAYMELSSLRSEDTAVYYCAGSYYSYDVLDYWGQGTTVTVSSGGGGSGGGGSGGGGSGGGGSDIQMTQSPSFLSASVGDRVTITCKASQNVEDRVAWHQQKPGKAPKALIYSSSHRYKGVPSRFSGSGSGTEFTLTISSLQPEDFATYFCQQFKSYPLTFGQGTKLEIK

SEQ ID NO: 181 - protein, 107 aa, Artificial Sequence
  Description of Artificial Sequence: Synthetic polypeptide
DIQMTQSPSFLSASVGDRVTITCKASQNVEDRVAWHQQKPGKAPKALIYSSSHRYKGVPSRFSGSGSGTEFTLTISSLQPEDFATYFCQQFKSYPLTFGQGTKLEIK

SEQ ID NO: 182 - protein, 119 aa, Artificial Sequence
  Description of Artificial Sequence: Synthetic polypeptide
QVQLVQSGAEVKKPGSSVKVSCKASGHDFKLTYIHWVRQAPGQGLEWMGRVSPGSGNTKYNEKFKGRVTITADTSTSTAYMELSSLRSEDTAVYYCAGSYYSYDVLDYWGQGTTVTVSS

SEQ ID NO: 183 - protein, 246 aa, Artificial Sequence
  Description of Artificial Sequence: Synthetic polypeptide
QVQLVQSGAEVKKPGSSVKVSCKASGHDFDKTYIHWVRQAPGQGLEWMGRIYPGSGNVKYNEKFKGRVTITADTSTSTAYMELSSLRSEDTAVYYCAGSYYSYDVLDYWGQGTTVTVSSGGGGSGGGGSGGGGSGGGGSDIQMTQSPSFLSASVGDRVTITCKASQNVADRVAWYQQKPGKAPKALIYSSSHRYKGVPSRFSGSGSGTEFTLTISSLQPEDFATYFCQQFKSYPLTFGQGTKLEIK

SEQ ID NO: 184 - protein, 107 aa, Artificial Sequence; identical to SEQ ID NO: 141
  Description of Artificial Sequence: Synthetic polypeptide

SEQ ID NO: 185 - protein, 119 aa, Artificial Sequence
  Description of Artificial Sequence: Synthetic polypeptide
QVQLVQSGAEVKKPGSSVKVSCKASGHDFDKTYIHWVRQAPGQGLEWMGRIYPGSGNVKYNEKFKGRVTITADTSTSTAYMELSSLRSEDTAVYYCAGSYYSYDVLDYWGQGTTVTVSS

SEQ ID NO: 186 - protein, 246 aa, Artificial Sequence
  Description of Artificial Sequence: Synthetic polypeptide
QVQLVQSGAEVKKPGSSVKVSCKASGTDFDKTYIHWVRQAPGQGLEWMGRISAGSGNVKYNEKFKGRVTITADTSTSTAYMELSSLRSEDTAVYYCAGSYYSYDVLDYWGQGTTVTVSSGGGGSGGGGSGGGGSGGGGSDIQMTQSPSFLSASVGDRVTITCKASQNVDDRVAWYQQKPGKAPKALIYSSSHRYKGVPSRFSGSGSGTEFTLTISSLQPEDFATYFCQQFKSYPLTFGQGTKLEIK

SEQ ID NO: 187 - protein, 107 aa, Artificial Sequence; identical to SEQ ID NO: 87
  Description of Artificial Sequence: Synthetic polypeptide

SEQ ID NO: 188 - protein, 119 aa, Artificial Sequence
  Description of Artificial Sequence: Synthetic polypeptide
QVQLVQSGAEVKKPGSSVKVSCKASGTDFDKTYIHWVRQAPGQGLEWMGRISAGSGNVKYNEKFKGRVTITADTSTSTAYMELSSLRSEDTAVYYCAGSYYSYDVLDYWGQGTTVTVSS

SEQ ID NO: 189 - protein, 246 aa, Artificial Sequence
  Description of Artificial Sequence: Synthetic polypeptide
QVQLVQSGAEVKKPGSSVKVSCKASGTDFDKIYIHWVRQAPGQGLEWMGRISAGSGNIKYNEKFKGRVTITADTSTSTAYMELSSLRSEDTAVYYCAGSYYSYDVLDYWGQGTTVTVSSGGGGSGGGGSGGGGSGGGGSDIQMTQSPSFLSASVGDRVTITCKASQNVDDRVAWYQQKPGKAPKALIYSSSHRYKGVPSRFSGSGSGTEFTLTISSLQPEDFATYFCQQFKSYPLTFGQGTKLEIK

SEQ ID NO: 190 - protein, 107 aa, Artificial Sequence; identical to SEQ ID NO: 87
  Description of Artificial Sequence: Synthetic polypeptide

SEQ ID NO: 191 - protein, 119 aa, Artificial Sequence
  Description of Artificial Sequence: Synthetic polypeptide
QVQLVQSGAEVKKPGSSVKVSCKASGTDFDKIYIHWVRQAPGQGLEWMGRISAGSGNIKYNEKFKGRVTITADTSTSTAYMELSSLRSEDTAVYYCAGSYYSYDVLDYWGQGTTVTVSS

SEQ ID NO: 192 - protein, 246 aa, Artificial Sequence
  Description of Artificial Sequence: Synthetic polypeptide
QVQLVQSGAEVKKPGSSVKVSCKASGTDFDKIYIHWVRQAPGQGLEWMGRISAGSGNVKYNEKFKGRVTITADTSTSTAYMELSSLRSEDTAVYYCAGSYYSYDVLDYWGQGTTVTVSSGGGGSGGGGSGGGGSGGGGSDIQMTQSPSFLSASVGDRVTITCKASQNVGDRVAWYQQKPGKAPKALIYSSSHRYKGVPSRFSGSGSGTEFTLTISSLQPEDFATYFCQQFKSYPLTFGQGTKLEIK

SEQ ID NO: 193 - protein, 107 aa, Artificial Sequence; identical to SEQ ID NO: 102
  Description of Artificial Sequence: Synthetic polypeptide

SEQ ID NO: 194 - protein, 119 aa, Artificial Sequence; identical to SEQ ID NO: 85
  Description of Artificial Sequence: Synthetic polypeptide

SEQ ID NO: 195 - protein, 246 aa, Artificial Sequence
  Description of Artificial Sequence: Synthetic polypeptide
QVQLVQSGAEVKKPGSSVKVSCKASGGTFKLTYIHWVRQAPGQGLEWMGRVSAGSGNVKYNEKFKGRVTITADTSTSTAYMELSSLRSEDTAVYYCAGSYYSYDVLDYWGQGTTVTVSSGGGGSGGGGSGGGGSGGGGSDIQMTQSPSFLSASVGDRVTITCKASQNVDDRVAWYQQKPGKAPKALIYSSSHRYKGVPSRFSGSGSGTEFTLTISSLQPEDFATYFCQQFKSYPLTFGQGTKLEIK

SEQ ID NO: 196 - protein, 107 aa, Artificial Sequence; identical to SEQ ID NO: 87
  Description of Artificial Sequence: Synthetic polypeptide

SEQ ID NO: 197 - protein, 119 aa, Artificial Sequence
  Description of Artificial Sequence: Synthetic polypeptide
QVQLVQSGAEVKKPGSSVKVSCKASGGTFKLTYIHWVRQAPGQGLEWMGRVSAGSGNVKYNEKFKGRVTITADTSTSTAYMELSSLRSEDTAVYYCAGSYYSYDVLDYWGQGTTVTVSS

SEQ ID NO: 198 - protein, 246 aa, Artificial Sequence
  Description of Artificial Sequence: Synthetic polypeptide
QVQLVQSGAEVKKPGSSVKVSCKASGTDFKLTYIHWVRQAPGQGLEWMGRISPGSGNVKYNEKFKGRVTITADTSTSTAYMELSSLRSEDTAVYYCAGSYYSYDVLDYWGQGTTVTVSSGGGGSGGGGSGGGGSGGGGSDIQMTQSPSFLSASVGDRVTITCKASQNVDNRVAWHQQKPGKAPKALIYSSSHRYKGVPSRFSGSGSGTEFTLTISSLQPEDFATYFCQQFKSYPLTFGQGTKLEIK

SEQ ID NO: 199 - protein, 107 aa, Artificial Sequence
  Description of Artificial Sequence: Synthetic polypeptide
DIQMTQSPSFLSASVGDRVTITCKASQNVDNRVAWHQQKPGKAPKALIYSSSHRYKGVPSRFSGSGSGTEFTLTISSLQPEDFATYFCQQFKSYPLTFGQGTKLEIK

SEQ ID NO: 200 - protein, 119 aa, Artificial Sequence
  Description of Artificial Sequence: Synthetic polypeptide
QVQLVQSGAEVKKPGSSVKVSCKASGTDFKLTYIHWVRQAPGQGLEWMGRISPGSGNVKYNEKFKGRVTITADTSTSTAYMELSSLRSEDTAVYYCAGSYYSYDVLDYWGQGTTVTVSS

SEQ ID NO: 201 - protein, 246 aa, Artificial Sequence
  Description of Artificial Sequence: Synthetic polypeptide
QVQLVQSGAEVKKPGSSVKVSCKASGHDFDKFYIHWVRQAPGQGLEWMGRVSAGSGNTKYNEKFKGRVTITADTSTSTAYMELSSLRSEDTAVYYCAGSYYSYDVLDYWGQGTTVTVSSGGGGSGGGGSGGGGSGGGGSDIQMTQSPSFLSASVGDRVTITCKASQNVDNRVAWYQQKPGKAPKALIYSSSHRYKGVPSRFSGSGSGTEFTLTISSLQPEDFATYFCQQFKSYPLTFGQGTKLEIK

SEQ ID NO: 202 - protein, 107 aa, Artificial Sequence; identical to SEQ ID NO: 90
  Description of Artificial Sequence: Synthetic polypeptide

SEQ ID NO: 203 - protein, 119 aa, Artificial Sequence
  Description of Artificial Sequence: Synthetic polypeptide
QVQLVQSGAEVKKPGSSVKVSCKASGHDFDKFYIHWVRQAPGQGLEWMGRVSAGSGNTKYNEKFKGRVTITADTSTSTAYMELSSLRSEDTAVYYCAGSYYSYDVLDYWGQGTTVTVSS

SEQ ID NO: 204 - protein, 246 aa, Artificial Sequence
  Description of Artificial Sequence: Synthetic polypeptide
QVQLVQSGAEVKKPGSSVKVSCKASGTDFDKFYIHWVRQAPGQGLEWMGRVSAGSGNVKYNEKFKGRVTITADTSTSTAYMELSSLRSEDTAVYYCAGSYYSYDVLDYWGQGTTVTVSSGGGGSGGGGSGGGGSGGGGSDIQMTQSPSFLSASVGDRVTITCKASQNVGDRVVWYQQKPGKAPKALIYSSSHRYKGVPSRFSGSGSGTEFTLTISSLQPEDFATYFCQQFKSYPLTFGQGTKLEIK

SEQ ID NO: 205 - protein, 119 aa, Artificial Sequence
  Description of Artificial Sequence: Synthetic polypeptide
QVQLVQSGAEVKKPGSSVKVSCKASGTDFDKFYIHWVRQAPGQGLEWMGRVSAGSGNVKYNEKFKGRVTITADTSTSTAYMELSSLRSEDTAVYYCAGSYYSYDVLDYWGQGTTVTVSS

SEQ ID NO: 206 - protein, 246 aa, Artificial Sequence
  Description of Artificial Sequence: Synthetic polypeptide
QVQLVQSGAEVKKPGSSVKVSCKASGYSFTTYYIHWVRQAPGQGLEWMGWFSAGSGNTKYNEKFKGRVTITADTSTSTAYMELSSLRSEDTAVYYCAVSYYSYDVLDYWGQGTTVTVSSGGGGSGGGGSGGGGSGGGGSDIQMTQSPSFLSASVGDRVTITCKASQNVGINVVWHQQKPGKAPKALIYSSSHRYSGVPSRFSGSGSGTEFTLTISSLQPEDFATYFCQQFKSYPLTFGQGTKLEIK

SEQ ID NO: 207 - protein, 119 aa, Artificial Sequence
  Description of Artificial Sequence: Synthetic polypeptide
QVQLVQSGAEVKKPGSSVKVSCKASGYSFTTYYIHWVRQAPGQGLEWMGWFSAGSGNTKYNEKFKGRVTITADTSTSTAYMELSSLRSEDTAVYYCAVSYYSYDVLDYWGQGTTVTVSS

SEQ ID NO: 208 - protein, 246 aa, Artificial Sequence
  Description of Artificial Sequence: Synthetic polypeptide
QVQLVQSGAEVKKPGSSVKVSCKASGYSFTTYYIHWVRQAPGQGLEWMGWFSAGSGNTKYNEKFKGRVTITADTSTSTAYMELSSLRSEDTAVYYCAGSYYSYDVLDYWGQGTTVTVSSGGGGSGGGGSGGGGSGGGGSDIQMTQSPSFLSASVGDRVTITCKASQNVGINVVWHQQKPGKAPKALIYSSSHRYSGVPSRFSGSGSGTEFTLTISSLQPEDFATYFCQQFKSYPLTFGQGTKLEIK

SEQ ID NO: 209 - protein, 119 aa, Artificial Sequence
  Description of Artificial Sequence: Synthetic polypeptide
QVQLVQSGAEVKKPGSSVKVSCKASGYSFTTYYIHWVRQAPGQGLEWMGWFSAGSGNTKYNEKFKGRVTITADTSTSTAYMELSSLRSEDTAVYYCAGSYYSYDVLDYWGQGTTVTVSS

SEQ ID NO: 210 - protein, 246 aa, Artificial Sequence
  Description of Artificial Sequence: Synthetic polypeptide
QVQLVQSGAEVKKPGSSVKVSCKASGYSFTTYYIHWVRQAPGQGLEWMGWFFPGSGNTKYNEKFKGRVTITADTSTSTAYMELSSLRSEDTAVYYCAGSYYSYDVLDYWGQGTTVTVSSGGGGSGGGGSGGGGSGGGGSDIQMTQSPSFLSASVGDRVTITCKASQNVGINVVWHQQKPGKAPKALIYSSSHRYSGVPSRFSGSGSGTEFTLTISSLQPEDFATYFCQQFKSYPLTFGQGTKLEIK

SEQ ID NO: 211 - protein, 119 aa, Artificial Sequence
  Description of Artificial Sequence: Synthetic polypeptide
QVQLVQSGAEVKKPGSSVKVSCKASGYSFTTYYIHWVRQAPGQGLEWMGWFFPGSGNTKYNEKFKGRVTITADTSTSTAYMELSSLRSEDTAVYYCAGSYYSYDVLDYWGQGTTVTVSS

SEQ ID NO: 212 - protein, 246 aa, Artificial Sequence
  Description of Artificial Sequence: Synthetic polypeptide
QVQLVQSGAEVKKPGSSVKVSCKASGYSFTTYYIHWVRQAPGQGLEWMGWFSPGSGNTKYNEKFKGRVTITADTSTSTAYMELSSLRSEDTAVYYCAVSYYSYDVLDYWGQGTTVTVSSGGGGSGGGGSGGGGSGGGGSDIQMTQSPSFLSASVGDRVTITCKASQNVGINVVWHQQKPGKAPKALIYSSSHRYSGVPSRFSGSGSGTEFTLTISSLQPEDFATYFCQQFKSYPLTFGQGTKLEIK

SEQ ID NO: 213 - protein, 119 aa, Artificial Sequence
  Description of Artificial Sequence: Synthetic polypeptide
QVQLVQSGAEVKKPGSSVKVSCKASGYSFTTYYIHWVRQAPGQGLEWMGWFSPGSGNTKYNEKFKGRVTITADTSTSTAYMELSSLRSEDTAVYYCAVSYYSYDVLDYWGQGTTVTVSS

SEQ ID NO: 214 - protein, 246 aa, Artificial Sequence
  Description of Artificial Sequence: Synthetic polypeptide
QVQLVQSGAEVKKPGSSVKVSCKASGYSFTTYYIHWVRQAPGQGLEWMGWFSPGSGNTKYNEKFKGRVTITADTSTSTAYMELSSLRSEDTAVYYCAGSYYSYDVLDYWGQGTTVTVSSGGGGSGGGGSGGGGSGGGGSDIQMTQSPSFLSASVGDRVTITCKASQNVGINVVWHQQKPGKAPKALIYSSSHRYSGVPSRFSGSGSGTEFTLTISSLQPEDFATYFCQQFKSYPLTFGQGTKLEIK

SEQ ID NO: 215 - protein, 119 aa, Artificial Sequence
  Description of Artificial Sequence: Synthetic polypeptide
QVQLVQSGAEVKKPGSSVKVSCKASGYSFTTYYIHWVRQAPGQGLEWMGWFSPGSGNTKYNEKFKGRVTITADTSTSTAYMELSSLRSEDTAVYYCAGSYYSYDVLDYWGQGTTVTVSS

SEQ ID NO: 216 - protein, 246 aa, Artificial Sequence
  Description of Artificial Sequence: Synthetic polypeptide
QVQLVQSGAEVKKPGSSVKVSCKASGYSFTTYYIHWVRQAPGQGLEWMGRIFPGSGNIKYNEKFKGRVTITADTSTSTAYMELSSLRSEDTAVYYCAGSYYSYDVLDYWGQGTTVTVSSGGGGSGGGGSGGGGSGGGGSDIQMTQSPSFLSASVGDRVTITCKASQNVGINVVWHQQKPGKAPKALIYSSSHRYSGVPSRFSGSGSGTEFTLTISSLQPEDFATYFCQQFKSYPLTFGQGTKLEIK

SEQ ID NO: 217 - protein, 119 aa, Artificial Sequence
  Description of Artificial Sequence: Synthetic polypeptide
QVQLVQSGAEVKKPGSSVKVSCKASGYSFTTYYIHWVRQAPGQGLEWMGRIFPGSGNIKYNEKFKGRVTITADTSTSTAYMELSSLRSEDTAVYYCAGSYYSYDVLDYWGQGTTVTVSS

SEQ ID NO: 218 - protein, 246 aa, Artificial Sequence
  Description of Artificial Sequence: Synthetic polypeptide
QVQLVQSGAEVKKPGSSVKVSCKASGYSFTTYYIHWVRQAPGQGLEWMGWFFPGSGNIKYNEKFKGRVTITADTSTSTAYMELSSLRSEDTAVYYCAGSIYSAGVLDYWGQGTTVTVSSGGGGSGGGGSGGGGSGGGGSDIQMTQSPSFLSASVGDRVTITCKASQNVGINVVWHQQKPGKAPKALIYSSSHRYSGVPSRFSGSGSGTEFTLTISSLQPEDFATYFCQQFKSYPLTFGQGTKLEIK

SEQ ID NO: 219 - protein, 119 aa, Artificial Sequence
  Description of Artificial Sequence: Synthetic polypeptide
QVQLVQSGAEVKKPGSSVKVSCKASGYSFTTYYIHWVRQAPGQGLEWMGWFFPGSGNIKYNEKFKGRVTITADTSTSTAYMELSSLRSEDTAVYYCAGSIYSAGVLDYWGQGTTVTVSS

SEQ ID NO: 220 - protein, 246 aa, Artificial Sequence
  Description of Artificial Sequence: Synthetic polypeptide
QVQLVQSGAEVKKPGSSVKVSCKASGYSFTLGYIHWVRQAPGQGLEWMGWFFPGSGNIKYNEKFKGRVTITADTSTSTAYMELSSLRSEDTAVYYCAGSYYSYDVLDYWGQGTTVTVSSGGGGSGGGGSGGGGSGGGGSDIQMTQSPSFLSASVGDRVTITCKASQNVGINVVWHQQKPGKAPKALIYSSSHRYSGVPSRFSGSGSGTEFTLTISSLQPEDFATYFCQQFKSYPLTFGQGTKLEIK

SEQ ID NO: 221 - protein, 119 aa, Artificial Sequence
  Description of Artificial Sequence: Synthetic polypeptide
QVQLVQSGAEVKKPGSSVKVSCKASGYSFTLGYIHWVRQAPGQGLEWMGWFFPGSGNIKYNEKFKGRVTITADTSTSTAYMELSSLRSEDTAVYYCAGSYYSYDVLDYWGQGTTVTVSS

SEQ ID NO: 222 - protein, 246 aa, Artificial Sequence
  Description of Artificial Sequence: Synthetic polypeptide
QVQLVQSGAEVKKPGSSVKVSCKASGYSFRLTYIHWVRQAPGQGLEWMGWFFPGSGNIKYNEKFKGRVTITADTSTSTAYMELSSLRSEDTAVYYCAGSYYSYDVLDYWGQGTTVTVSSGGGGSGGGGSGGGGSGGGGSDIQMTQSPSFLSASVGDRVTITCKASQNVGINVVWHQQKPGKAPKALIYSSSHRYSGVPSRFSGSGSGTEFTLTISSLQPEDFATYFCQQFKSYPLTFGQGTKLEIK

SEQ ID NO: 223 - protein, 119 aa, Artificial Sequence
  Description of Artificial Sequence: Synthetic polypeptide
QVQLVQSGAEVKKPGSSVKVSCKASGYSFRLTYIHWVRQAPGQGLEWMGWFFPGSGNIKYNEKFKGRVTITADTSTSTAYMELSSLRSEDTAVYYCAGSYYSYDVLDYWGQGTTVTVSS

SEQ ID NO: 224 - protein, 246 aa, Artificial Sequence
  Description of Artificial Sequence: Synthetic polypeptide
QVQLVQSGAEVKKPGSSVKVSCKASGYSFHNWYIHWVRQAPGQGLEWMGWFFPGSGNIKYNEKFKGRVTITADTSTSTAYMELSSLRSEDTAVYYCAGSYYSYDVLDYWGQGTTVTVSSGGGGSGGGGSGGGGSGGGGSDIQMTQSPSFLSASVGDRVTITCKASQNVGINVVWHQQKPGKAPKALIYSSSHRYSGVPSRFSGSGSGTEFTLTISSLQPEDFATYFCQQFKSYPLTFGQGTKLEIK

SEQ ID NO: 225 - protein, 119 aa, Artificial Sequence
  Description of Artificial Sequence: Synthetic polypeptide
QVQLVQSGAEVKKPGSSVKVSCKASGYSFHNWYIHWVRQAPGQGLEWMGWFFPGSGNIKYNEKFKGRVTITADTSTSTAYMELSSLRSEDTAVYYCAGSYYSYDVLDYWGQGTTVTVSS

SEQ ID NO: 226-229 - skipped (4 entries)

SEQ ID NO: 230 - protein, 107 aa, Artificial Sequence
  Description of Artificial Sequence: Synthetic polypeptide
  MOD_RES (30)..(30): G, E, A, or D
  MOD_RES (31)..(31): N or D
  MOD_RES (32)..(32): R or K
  MOD_RES (36)..(36): Y or H
  MOD_RES (56)..(56): K or S
DIQMTQSPSFLSASVGDRVTITCKASQNVXXXVAWXQQKPGKAPKALIYSSSHRYXGVPSRFSGSGSGTEFTLTISSLQPEDFATYFCQQFKSYPLTFGQGTKLEIK

SEQ ID NO: 231 - protein, 119 aa, Artificial Sequence
  Description of Artificial Sequence: Synthetic polypeptide
  MOD_RES (27)..(27): H, T, G, or Y
  MOD_RES (28)..(28): D, T, or S
  MOD_RES (30)..(30): H, R, D, K, or T
  MOD_RES (31)..(31): L, D, K, T, or N
  MOD_RES (32)..(32): W, F, T, I, Y, or G
  MOD_RES (50)..(50): R or W
  MOD_RES (51)..(51): V, I, or F
  MOD_RES (52)..(52): F, S, or Y
  MOD_RES (53)..(53): A or P
  MOD_RES (57)..(57): N or S
  MOD_RES (58)..(58): T, V, Y, or I
  MOD_RES (59)..(59): K or R
  MOD_RES (98)..(98): G or V
  MOD_RES (100)..(100): Y or I
  MOD_RES (103)..(103): Y or A
  MOD_RES (104)..(104): D or G
QVQLVQSGAEVKKPGSSVKVSCKASGXXFXXXYIHWVRQAPGQGLEWMGXXXXGSGXXXYNEKFKGRVTITADTSTSTAYMELSSLRSEDTAVYYCAXSXYSXXVLDYWGQGTTVTVSS

SEQ ID NO: 232 - protein, 107 aa, Artificial Sequence
  Description of Artificial Sequence: Synthetic polypeptide
DIQMTQTTSSLSASLGDRVTISCSASQGISNYLNWYQQKPDGTVKLLIYYTSSLHSGVPSRFSGSGSGTDYSLTISNLEPEDIATYYCQQYSKLPRTFGGGTKVEIK

SEQ ID NO: 233 - protein, 120 aa, Artificial Sequence
  Description of Artificial Sequence: Synthetic polypeptide
QVQLKESGPGLVAPSQSLSITCTVSGFSLTAYGVNWVRQPPGKGLEWLGMIWGDGNTDYNSALKSRLSISKDNSKSQVFLKMNSLQTDDTARYYCARDRVTATLYAMDYWGQGTSVTVSS

SEQ ID NO: 234-1003 - skipped (770 entries)

SEQ ID NO: 1004 - protein, 721 aa, Artificial Sequence
  Description of Artificial Sequence: Synthetic polypeptide
METDTLLLWVLLLWVPGSTGQVQLVQSGAEVKKPGSSVKVSCKASGYSFTTYYIHWVRQAPGQGLEWMGWFFPGSGNIKYNEKFKGRVTITADTSTSTAYMELSSLRSEDTAVYYCAGSYYSYDVLDYWGQGTTVTVSSGGGGSGGGGSGGGGSGGGGSDIQMTQSPSFLSASVGDRVTITCKASQNVGINVVWHQQKPGKAPKALIYSSSHRYSGVPSRFSGSGSGTEFTLTISSLQPEDFATYFCQQFKSYPLTFGQGTKLEIKGGGGSQVTLRESGPALVKPTQTLTLTCTFSGFSLSTSGMGVGWIRQPPGKALEWLAHIWWDDDKRYNPALKSRLTISKDTSKNQVFLTMTNMDPVDTATYYCARMELWSYYFDYWGQGTTVTVSSASTKGPSVFPLAPSSKSTSGGTAALGCLVKDYFPEPVTVSWNSGALTSGVHTFPAVLQSSGLYSLSSVVTVPSSSLGTQTYICNVNHKPSNTKVDKKVEPKSCDKTHTCPPCPAPELLGGPSVFLFPPKPKDTLMISRTPEVTCVVVDVSHEDPEVKFNWYVDGVEVHNAKTKPREEQYASTYRVVSVLTVLHQDWLNGKEYKCKVSNKALPAPIEKTISKAKGQPREPQVYTLPPSREEMTKNQVSLTCLVKGFYPSDIAVEWESNGQPENNYKTTPPVLDSDGSFFLYSKLTVDKSRWQQGNVFSCSVMHEALHNHYTQKSLSLSPGK

SEQ ID NO: 1005 - protein, 233 aa, Artificial Sequence
  Description of Artificial Sequence: Synthetic polypeptide
METPAQLLFLLLLWLPDTTGENVLTQSPATLSLSPGERATLSCSASSSVSYMHWYQQKPGQAPRLLIYDTSKLASGIPARFSGSGSGTDHTLTISSLEPEDFAVYYCFQGSVYPFTFGQGTKLEIKRTVAAPSVFIFPPSDEQLKSGTASVVCLLNNFYPREAKVQWKVDNALQSGNSQESVTEQDSKDSTYSLSSTLTLSKADYEKHKVYACEVTHQGLSSPVTKSFNRGEC

SEQ ID NO: 1006 - protein, 721 aa, Artificial Sequence
  Description of Artificial Sequence: Synthetic polypeptide
METDTLLLWVLLLWVPGSTGQVQLVQSGAEVKKPGSSVKVSCKASGYSFTTYYIHWVRQAPGQGLEWMGWFFPGSGNIKYNEKFKGRVTITADTSTSTAYMELSSLRSEDTAVYYCAGSYYSYDVLDYWGQGTTVTVSSGGGGSGGGGSGGGGSGGGGSDIQMTQSPSFLSASVGDRVTITCKASQNVGINVVWHQQKPGKAPKALIYSSSHRYSGVPSRFSGSGSGTEFTLTISSLQPEDFATYFCQQFKSYPLTFGQGTKLEIKGGGGSQVQLVESGGGVVQPGRSLRLSCAASGIDFSRYWMSWVRQAPGKGLEWVGEINPDSSTINYAPSLKDRFTISRDNSKNTLYLQMSSLRAEDTAVYYCASLYYDYGDAMDYWGQGTTVTVSSASTKGPSVFPLAPSSKSTSGGTAALGCLVKDYFPEPVTVSWNSGALTSGVHTFPAVLQSSGLYSLSSVVTVPSSSLGTQTYICNVNHKPSNTKVDKKVEPKSCDKTHTCPPCPAPELLGGPSVFLFPPKPKDTLMISRTPEVTCVVVDVSHEDPEVKFNWYVDGVEVHNAKTKPREEQYASTYRVVSVLTVLHQDWLNGKEYKCKVSNKALPAPIEKTISKAKGQPREPQVYTLPPSREEMTKNQVSLTCLVKGFYPSDIAVEWESNGQPENNYKTTPPVLDSDGSFFLYSKLTVDKSRWQQGNVFSCSVMHEALHNRFTQKSLSLSPGK

SEQ ID NO: 1007 - protein, 234 aa, Artificial Sequence
  Description of Artificial Sequence: Synthetic polypeptide
METDTLLLWVLLLWVPGSTGDIQMTQSPSSLSASVGDRVTITCKASQSVDSNVAWYQQKPEKAPKALIFSASLRFSGVPSRFSGSGSGTDFTLTISSLQPEDFATYFCQQYNNYPLTFGQGTKLEIKRTVAAPSVFIFPPSDEQLKSGTASVVCLLNNFYPREAKVQWKVDNALQSGNSQESVTEQDSKDSTYSLSSTLTLSKADYEKHKVYACEVTHQGLSSPVTKSFNRGEC

SEQ ID NO: 1008-1099 - skipped (92 entries)

SEQ ID NO: 1100 - protein, 119 aa, Artificial Sequence; identical to SEQ ID NO: 9
  Description of Artificial Sequence: Synthetic polypeptide

SEQ ID NO: 1101 - protein, 106 aa, Artificial Sequence
  Description of Artificial Sequence: Synthetic polypeptide
QSVLTQPPSVSEAPRQRVTISCKASQNVGINVVWHQQLPGKAPKALIYSSSHRYSGVSDRFSGSGSGTSFSLAISGLQSEDEADYFCQQFKSYPLTFGTGTKVTVL

SEQ ID NO: 1102 - protein, 5 aa, Artificial Sequence
  Description of Artificial Sequence: Synthetic peptide
SAYMH

SEQ ID NO: 1103 - protein, 17 aa, Artificial Sequence
  Description of Artificial Sequence: Synthetic peptide
RIDPATGKTKYAPKFQA

SEQ ID NO: 1104 - protein, 10 aa, Artificial Sequence
  Description of Artificial Sequence: Synthetic peptide
SLNWDYGLDY

SEQ ID NO: 1105 - protein, 7 aa, Artificial Sequence
  Description of Artificial Sequence: Synthetic peptide
GFNIKSA

SEQ ID NO: 1106 - protein, 6 aa, Artificial Sequence
  Description of Artificial Sequence: Synthetic peptide
DPATGK

SEQ ID NO: 1107 - protein, 15 aa, Artificial Sequence
  Description of Artificial Sequence: Synthetic peptide
RASKSVSILGTHLIH

SEQ ID NO: 1108 - protein, 7 aa, Artificial Sequence
  Description of Artificial Sequence: Synthetic peptide
AASNLES

SEQ ID NO: 1109 - protein, 9 aa, Artificial Sequence
  Description of Artificial Sequence: Synthetic peptide
QQSIEDPWT

SEQ ID NO: 1110 - protein, 11 aa, Artificial Sequence
  Description of Artificial Sequence: Synthetic peptide
SKSVSILGTHL

SEQ ID NO: 1111 - protein, 111 aa, Artificial Sequence
  Description of Artificial Sequence: Synthetic polypeptide
DIVLTQSPASLAVSLGQRATISCRASKSVSILGTHLIHWYQQKPGQPPKLLIYAASNLESGVPARFSGSGSETVFTLNIHPVEEEDAATYFCQQSIEDPWTFGGGTKLGIK

SEQ ID NO: 1112 - protein, 119 aa, Artificial Sequence
  Description of Artificial Sequence: Synthetic polypeptide
EVQLQQSVADLVRPGASLKLSCTASGFNIKSAYMHWVIQRPDQGPECLGRIDPATGKTKYAPKFQAKATITADTSSNTAYLQLSSLTSEDTAIYYCTRSLNWDYGLDYWGQGTSVTVSS

SEQ ID NO: 1113 - protein, 119 aa, Artificial Sequence
  Description of Artificial Sequence: Synthetic polypeptide
QVQLVQSGAEVKKPGASVKVSCKASGFNIKSAYMHWVRQAPGQGLEWMGRIDPATGKTKYAPKFQARVTMTADTSTNTAYMELSSLRSEDTAVYYCARSLNWDYGLDYWGQGTLVTVSS

SEQ ID NO: 1114 - protein, 119 aa, Artificial Sequence
  Description of Artificial Sequence: Synthetic polypeptide
QVQLVQSGAEVKKPGASVKVSCKASGFNIKSAYMHWVRQAPGQEPGCMGRIDPATGKTKYAPKFQARVTMTADTSINTAYTELSSLRSEDTATYYCARSLNWDYGLDYWGQGTLVTVSS

SEQ ID NO: 1115 - protein, 119 aa, Artificial Sequence
  Description of Artificial Sequence: Synthetic polypeptide
QVQLVQSGAEVKKPGSSVKVSCKASGFNIKSAYMHWVRQAPGQGLEWMGRIDPATGKTKYAPKFQARVTITADTSTNTAYMELSSLRSEDTAVYYCARSLNWDYGLDYWGQGTLVTVSS

SEQ ID NO: 1116 - protein, 119 aa, Artificial Sequence
  Description of Artificial Sequence: Synthetic polypeptide
QVQLVQSGAEVKKPGASVKVSCKASGFNIKSAYMHWVRQAPGQRLEWMGRIDPATGKTKYAPKFQARVTITADTSANTAYMELSSLRSEDTAVYYCARSLNWDYGLDYWGQGTLVTVSS

SEQ ID NO: 1117 - protein, 109 aa, Artificial Sequence
  Description of Artificial Sequence: Synthetic polypeptide
EIVLTQSPATLSLSPGERATLSCRASKSVSILGTHLIHWYQQKPGQAPRLLIYAASNLESGIPARFSGSGSETDFTLTISSLEPEDFAVYFCQQSIEDPFGGGTKVEIK

SEQ ID NO: 1118 - protein, 109 aa, Artificial Sequence
  Description of Artificial Sequence: Synthetic polypeptide
EIVLTQSPATLSLSPGERATLSCRASKSVSILGTHLIHWYQQKPGLAPRLLIYAASNLESGIPDRFSGSGSETDFTLTISRLEPEDFAVYFCQQSIEDPFGGGTKVEIK

SEQ ID NO: 1119 - protein, 109 aa, Artificial Sequence
  Description of Artificial Sequence: Synthetic polypeptide
EIVLTQSPGTLSLSPGERATLSCRASKSVSILGTHLIHWYQQKPGQAPRLLIYAASNLESGIPDRFSGSGSETDFTLTISRLEPEDFAVYFCQQSIEDPFGGGTKVEIK

SEQ ID NO: 1120 - protein, 5 aa, Artificial Sequence
  Description of Artificial Sequence: Synthetic peptide
DTYMY

SEQ ID NO: 1121 - protein, 17 aa, Artificial Sequence
  Description of Artificial Sequence: Synthetic peptide
RIDPANGNTKYDPKFQD

SEQ ID NO: 1122 - protein, 9 aa, Artificial Sequence
  Description of Artificial Sequence: Synthetic peptide
GSYYYAMDY

SEQ ID NO: 1123 - protein, 7 aa, Artificial Sequence
  Description of Artificial Sequence: Synthetic peptide
GFKTEDT

SEQ ID NO: 1124 - protein, 6 aa, Artificial Sequence
  Description of Artificial Sequence: Synthetic peptide
DPANGN

SEQ ID NO: 1125 - protein, 10 aa, Artificial Sequence
  Description of Artificial Sequence: Synthetic peptide
GFKTEDTYMY

SEQ ID NO: 1126 - protein, 15 aa, Artificial Sequence
  Description of Artificial Sequence: Synthetic peptide
RASESVDSYGNSFMH

SEQ ID NO: 1127 - protein, 7 aa, Artificial Sequence
  Description of Artificial Sequence: Synthetic peptide
RASNLES

SEQ ID NO: 1128 - protein, 9 aa, Artificial Sequence
  Description of Artificial Sequence: Synthetic peptide
QQSNEDPYT

SEQ ID NO: 1129 - protein, 111 aa, Artificial Sequence
  Description of Artificial Sequence: Synthetic polypeptide
DIVLTQSPASLAVSLGQRATISCRASESVDSYGNSFMHWYQQKPGQPPKLLIYRASNLESGIPARFSGSGSRTDFTLTINPVEADDVATYYCQQSNEDPYTFGGGTKLEIK

SEQ ID NO: 1130 - protein, 118 aa, Artificial Sequence
  Description of Artificial Sequence: Synthetic polypeptide
EVQLQQSGAELVKPGASVKLSCTASGFKTEDTYMYWVKQRPEQGLEWIGRIDPANGNTKYDPKFQDKATITADSSSNTAYLQLSSLPSEDTAVYYCARGSYYYAMDYWGQGTSVTVSS

SEQ ID NO: 1131 - protein, 118 aa, Artificial Sequence
  Description of Artificial Sequence: Synthetic polypeptide
QVQLVQSGAEVKKPGSSVKVSCKASGFKTEDTYMYWVRQAPGQGLEWIGRIDPANGNTKYDPKFQDRATITADSSTNTAYMELSSLRSEDTAVYYCARGSYYYAMDYWGQGTLVTVSS

SEQ ID NO: 1132 - protein, 118 aa, Artificial Sequence
  Description of Artificial Sequence: Synthetic polypeptide
QVQLVQSGAEVKKPGASVKVSCKASGFKTEDTYMYWVRQAPGQRLEWIGRIDPANGNTKYDPKFQDRATITADSSANTAYMELSSLRSEDTAVYYCARGSYYYAMDYWGQGTLVTVSS

SEQ ID NO: 1133 - protein, 118 aa, Artificial Sequence
  Description of Artificial Sequence: Synthetic polypeptide
EVQLVESGGGLVQPGGSLKLSCAASGFKTEDTYMYWVRQASGKGLEWIGRIDPANGNTKYDPKFQDRATISADSSKNTAYLQMNSLKTEDTAVYYCARGSYYYAMDYWGQGTLVTVSS

SEQ ID NO: 1134 - protein, 118 aa, Artificial Sequence
  Description of Artificial Sequence: Synthetic polypeptide
EVQLVQSGAEVKKPGESLRISCKASGFKTEDTYMYWVRQMPGKGLEWIGRIDPANGNTKYDPKFQDQATISADSSINTAYLQWSSLKASDTAMYYCARGSYYYAMDYWGQGTLVTVSS

SEQ ID NO: 1135 - protein, 118 aa, Artificial Sequence
  Description of Artificial Sequence: Synthetic polypeptide
QVQLVQSGSELKKPGASVKVSCKASGFKTEDTYMYWVRQAPGQGLEWIGRIDPANGNTKYDPKFQDRAVISADSSVNTAYLQISSLKAEDTAVYYCARGSYYYAMDYWGQGTLVTVSS

SEQ ID NO: 1136 - protein, 111 aa, Artificial Sequence
  Description of Artificial Sequence: Synthetic polypeptide
DIVLTQSPDSLAVSLGERATINCRASESVDSYGNSFMHWYQQKPGQPPKLLIYRASNLESGVPDRFSGSGSRTDFTLTISSLQAEDVAVYYCQQSNEDPYTFGQGTKLEIK

SEQ ID NO: 1137 - protein, 111 aa, Artificial Sequence
  Description of Artificial Sequence: Synthetic polypeptide
EIVLTQSPATLSLSPGERATLSCRASESVDSYGNSFMHWYQQKPGQAPKLLIYRASNLESGIPARFSGSGSRTDFTLTISRLEPEDFAVYYCQQSNEDPYTFGQGTKLEIK

SEQ ID NO: 1138 - protein, 111 aa, Artificial Sequence
  Description of Artificial Sequence: Synthetic polypeptide
DIQLTQSPSSLSASVGDRVTITCRASESVDSYGNSFMHWYQQKPGQAPKLLIYRASNLESGVPSRFSGSGSRTDFTLTISSLQPEDVATYYCQQSNEDPYTFGQGTKLEIK

SEQ ID NO: 1139 - protein, 111 aa, Artificial Sequence
  Description of Artificial Sequence: Synthetic polypeptide
AIQLTQSPSSLSASVGDRVTITCRASESVDSYGNSFMHWYQQKPGKAPKLLIYRASNLESGVPSRFSGSGSRTDFTLTISSLQPEDFATYYCQQSNEDPYTFGQGTKLEIK

SEQ ID NO: 1140 - protein, 111 aa, Artificial Sequence
  Description of Artificial Sequence: Synthetic polypeptide
EIVLTQSPDFQSVTPKEKVTITCRASESVDSYGNSFMHWYQQKPDQSPKLLIYRASNLESGVPSRFSGSGSRTDFTLTINSLEAEDAATYYCQQSNEDPYTFGQGTKLEIK

SEQ ID NO: 1141 - protein, 5 aa, Artificial Sequence
  Description of Artificial Sequence: Synthetic peptide
SYAMS

SEQ ID NO: 1142 - protein, 17 aa, Artificial Sequence
  Description of Artificial Sequence: Synthetic peptide
HISNGGDYIYYADTVKG

SEQ ID NO: 1143 - protein, 12 aa, Artificial Sequence
  Description of Artificial Sequence: Synthetic peptide
PSYYSDPWFFDV

SEQ ID NO: 1144 - protein, 7 aa, Artificial Sequence
  Description of Artificial Sequence: Synthetic peptide
GFTFRSY

SEQ ID NO: 1145 - protein, 6 aa, Artificial Sequence
  Description of Artificial Sequence: Synthetic peptide
SNGGDY

SEQ ID NO: 1146 - protein, 10 aa, Artificial Sequence
  Description of Artificial Sequence: Synthetic peptide
GFTFRSYAMS

SEQ ID NO: 1147 - protein, 10 aa, Artificial Sequence
  Description of Artificial Sequence: Synthetic peptide
SAGSSVSFMH

SEQ ID NO: 1148 - protein, 7 aa, Artificial Sequence
  Description of Artificial Sequence: Synthetic peptide
DTSKLAS

SEQ ID NO: 1149 - protein, 9 aa, Artificial Sequence
  Description of Artificial Sequence: Synthetic peptide
LQGSGFPLT

SEQ ID NO: 1150 - protein, 6 aa, Artificial Sequence
  Description of Artificial Sequence: Synthetic peptide
GSSVSF

SEQ ID NO: 1151 - protein, 106 aa, Artificial Sequence
  Description of Artificial Sequence: Synthetic polypeptide
ENVLTQSPAIMSASPGEKVTMTCSAGSSVSFMHWYQQKSSTSPKLWIYDTSKLASGVPGRFSGSGSGNSFSLTISSMEAEDVAIYYCLQGSGFPLTFGSGTKLEIK

SEQ ID NO: 1152 - protein, 121 aa, Artificial Sequence
  Description of Artificial Sequence: Synthetic polypeptide
DVKLVESGEGLVKPGGSLKLSCAASGFTFRSYAMSWVRQTPEKRLEWVAHISNGGDYIYYADTVKGRFTISRDNARNTLYLQMSSLKSEDTAMYYCTRPSYYSDPWFFDVWGTGTTVTVSS

SEQ ID NO: 1153 - protein, 121 aa, Artificial Sequence
  Description of Artificial Sequence: Synthetic polypeptide
EVQLVESGGGLVQPGGSLRLSCAASGFTFRSYAMSWVRQAPGKGLEWVAHISNGGDYIYYADTVKGRFTISRDNAKNSLYLQMNSLRAEDTAVYYCTRPSYYSDPWFFDVWGQGTTVTVSS

SEQ ID NO: 1154 - protein, 121 aa, Artificial Sequence
  Description of Artificial Sequence: Synthetic polypeptide
QVQLVESGGGVVQPGRSLRLSCAASGFTFRSYAMSWVRQAPGKGLEWVAHISNGGDYIYYADTVKGRFTISRDNSKNTLYLQMSSLRAEDTAVYYCTRPSYYSDPWFFDVWGQGTTVTVSS

SEQ ID NO: 1155 - protein, 121 aa, Artificial Sequence
  Description of Artificial Sequence: Synthetic polypeptide
EVQLVESGGGLVQPGGSLRLSCAASGFTFRSYAMSWVRQAPGKGLEWVAHISNGGDYIYYADTVKGRFTISRDNSKNTLYLQMNSLRAEDTAVYYCTRPSYYSDPWFFDVWGQGTTVTVSS

SEQ ID NO: 1156 - protein, 121 aa, Artificial Sequence
  Description of Artificial Sequence: Synthetic polypeptide
QVQLVQSGSELKKPGASVKVSCKASGFTFRSYAMSWVRQAPGQGLEWVAHISNGGDYIYYADTVKGRFVISRDNSVNTLYLQISSLKAEDTAVYYCTRPSYYSDPWFFDVWGQGTTVTVSS

SEQ ID NO: 1157 - protein, 121 aa, Artificial Sequence
  Description of Artificial Sequence: Synthetic polypeptide
QVQLVQSGAEVKKPGASVKVSCKASGFTFRSYAMSWVRQAPGQRLEWVAHISNGGDYIYYADTVKGRFTITRDNSANTLYMELSSLRSEDTAVYYCTRPSYYSDPWFFDVWGQGTTVTVSS

SEQ ID NO: 1158 - protein, 106 aa, Artificial Sequence
  Description of Artificial Sequence: Synthetic polypeptide
ENVLTQSPATLSLSPGERATLSCSAGSSVSFMHWYQQKPGQAPKLLIYDTSKLASGIPARFSGSGSGNDFTLTISSLEPEDFAVYYCLQGSGFPLTFGQGTKLEIK

SEQ ID NO: 1159 - protein, 106 aa, Artificial Sequence
  Description of Artificial Sequence: Synthetic polypeptide
ENVLTQSPDFQSVTPKEKVTITCSAGSSVSFMHWYQQKPDQSPKLLIYDTSKLASGVPSRFSGSGSGNDFTLTINSLEAEDAATYYCLQGSGFPLTFGQGTKLEIK

SEQ ID NO: 1160 - protein, 106 aa, Artificial Sequence
  Description of Artificial Sequence: Synthetic polypeptide
DNQLTQSPSSLSASVGDRVTITCSAGSSVSFMHWYQQKPGKVPKLLIYDTSKLASGVPSRFSGSGSGNDFTLTISSLQPEDVATYYCLQGSGFPLTFGQGTKLEIK

SEQ ID NO: 1161 - protein, 106 aa, Artificial Sequence
  Description of Artificial Sequence: Synthetic polypeptide
ANQLTQSPSSLSASVGDRVTITCSAGSSVSFMHWYQQKPGKAPKLLIYDTSKLASGVPSRFSGSGSGNDFTLTISSLQPEDFATYYCLQGSGFPLTFGQGTKLEIK

SEQ ID NO: 1162 - protein, 106 aa, Artificial Sequence
  Description of Artificial Sequence: Synthetic polypeptide
DNVLTQSPDSLAVSLGERATINCSAGSSVSFMHWYQQKPGQPPKLLIYDTSKLASGVPDRFSGSGSGNDFTLTISSLQAEDVAVYYCLQGSGFPLTFGQGTKLEIK

SEQ ID NO: 1163 - protein, 5 aa, Artificial Sequence
  Description of Artificial Sequence: Synthetic peptide
DYNIH

SEQ ID NO: 1164 - protein, 17 aa, Artificial Sequence
  Description of Artificial Sequence: Synthetic peptide
YINPYNGRTGYNQKFKA

SEQ ID NO: 1165 - protein, 9 aa, Artificial Sequence
  Description of Artificial Sequence: Synthetic peptide
WDGSSYFDY

SEQ ID NO: 1166 - protein, 10 aa, Artificial Sequence
  Description of Artificial Sequence: Synthetic peptide
GYTFTDYNIH

SEQ ID NO: 1167 - protein, 6 aa, Artificial Sequence
  Description of Artificial Sequence: Synthetic peptide
NPYNGR

SEQ ID NO: 1168 - protein, 10 aa, Artificial Sequence
  Description of Artificial Sequence: Synthetic peptide
SASSSVSYMH

SEQ ID NO: 1169 - protein, 7 aa, Artificial Sequence
  Description of Artificial Sequence: Synthetic peptide
EISKLAS

SEQ ID NO: 1170 - protein, 9 aa, Artificial Sequence
  Description of Artificial Sequence: Synthetic peptide
QQWNYPLLT

SEQ ID NO: 1171 - protein, 106 aa, Artificial Sequence
  Description of Artificial Sequence: Synthetic polypeptide
EIVLTQSPAITAASLGQKVTITCSASSSVSYMHWYQQKSGTSPKPWIYEISKLASGVPARFSGSGSGTSYSLTISSMEAEDAAIYYCQQWNYPLLTFGAGTKLELK

SEQ ID NO: 1172 - protein, 118 aa, Artificial Sequence
  Description of Artificial Sequence: Synthetic polypeptide
EVQLQQSGPVLVKPGASVRMSCKASGYTFTDYNIHWVKQSHGRSLEWVGYINPYNGRTGYNQKFKAKATLTVDKSSSTAYMDLRSLTSEDSAVYYCARWDGSSYFDYWGQGTTLTVSS

SEQ ID NO: 1173 - protein, 118 aa, Artificial Sequence
  Description of Artificial Sequence: Synthetic polypeptide
QVQLVQSGAEVKKPGSSVKVSCKASGYTFTDYNIHWVRQAPGQGLEWVGYINPYNGRTGYNQKFKARATLTVDKSTSTAYMELSSLRSEDTAVYYCARWDGSSYFDYWGQGTTVTVSS

SEQ ID NO: 1174 - protein, 118 aa, Artificial Sequence
  Description of Artificial Sequence: Synthetic polypeptide
QVQLVQSGAEVKKPGASVKVSCKASGYTFTDYNIHWVRQAPGQGLEWVGYINPYNGRTGYNQKFKARATLTVDKSTSTAYMELRSLRSDDMAVYYCARWDGSSYFDYWGQGTTVTVSS

SEQ ID NO: 1175 - protein, 118 aa, Artificial Sequence
  Description of Artificial Sequence: Synthetic polypeptide
QVQLVQSGAEVKKPGASVKVSCKASGYTFTDYNIHWVRQATGQGLEWVGYINPYNGRTGYNQKFKARATLTVNKSISTAYMELSSLRSEDTAVYYCARWDGSSYFDYWGQGTTVTVSS

SEQ ID NO: 1176 - protein, 118 aa, Artificial Sequence
  Description of Artificial Sequence: Synthetic polypeptide
EVQLVESGGGLVQPGRSLRLSCTASGYTFTDYNIHWVRQAPGKGLEWVGYINPYNGRTGYNQKFKARATLSVDKSKSIAYLQMNSLKTEDTAVYYCARWDGSSYFDYWGQGTTVTVSS

SEQ ID NO: 1177 - protein, 118 aa, Artificial Sequence
  Description of Artificial Sequence: Synthetic polypeptide
QVQLVQSGSELKKPGASVKVSCKASGYTFTDYNIHWVRQAPGQGLEWVGYINPYNGRTGYNQKFKARAVLSVDKSVSTAYLQISSLKAEDTAVYYCARWDGSSYFDYWGQGTTVTVSS

SEQ ID NO: 1178 - protein, 106 aa, Artificial Sequence
  Description of Artificial Sequence: Synthetic polypeptide
EIVLTQSPATLSLSPGERATLSCSASSSVSYMHWYQQKPGQAPKLLIYEISKLASGIPARFSGSGSGTDYTLTISSLEPEDFAVYYCQQWNYPLLTFGQGTKLEIK

SEQ ID NO: 1179 - protein, 106 aa, Artificial Sequence
  Description of Artificial Sequence: Synthetic polypeptide
EIVLTQSPATLSLSPGERATLSCSASSSVSYMHWYQQKPGQAPKLLIYEISKLASGIPARFSGSGSGTDYTLTISRLEPEDFAVYYCQQWNYPLLTFGQGTKLEIK

SEQ ID NO: 1180 - protein, 106 aa, Artificial Sequence
  Description of Artificial Sequence: Synthetic polypeptide
EIVLTQSPDFQSVTPKEKVTITCSASSSVSYMHWYQQKPDQSPKLLIYEISKLASGVPSRFSGSGSGTDYTLTINSLEAEDAATYYCQQWNYPLLTFGQGTKLEIK

SEQ ID NO: 1181 - protein, 106 aa, Artificial Sequence
  Description of Artificial Sequence: Synthetic polypeptide
DIQLTQSPSFLSASVGDRVTITCSASSSVSYMHWYQQKPGKAPKLLIYEISKLASGVPSRFSGSGSGTEYTLTISSLQPEDFATYYCQQWNYPLLTFGQGTKLEIK

SEQ ID NO: 1182 - protein, 106 aa, Artificial Sequence
  Description of Artificial Sequence: Synthetic polypeptide
AIQLTQSPSSLSASVGDRVTITCSASSSVSYMHWYQQKPGKAPKLLIYEISKLASGVPSRFSGSGSGTDYTLTISSLQPEDFATYYCQQWNYPLLTFGQGTKLEIK

SEQ ID NO: 1183 - protein, 106 aa, Artificial Sequence
  Description of Artificial Sequence: Synthetic polypeptide
AIRLTQSPFSLSASVGDRVTITCSASSSVSYMHWYQQKPAKAPKLFIYEISKLASGVPSRFSGSGSGTDYTLTISSLQPEDFATYYCQQWNYPLLTFGQGTKLEIK

SEQ ID NO: 1184 - protein, 106 aa, Artificial Sequence
  Description of Artificial Sequence: Synthetic polypeptide
DIVLTQSPDSLAVSLGERATINCSASSSVSYMHWYQQKPGQPPKLLIYEISKLASGVPDRFSGSGSGTDYTLTISSLQAEDVAVYYCQQWNYPLLTFGQGTKLEIK

SEQ ID NO: 1185 - protein, 5 aa, Artificial Sequence
  Description of Artificial Sequence: Synthetic peptide
GSWMN

SEQ ID NO: 1186 - protein, 17 aa, Artificial Sequence
  Description of Artificial Sequence: Synthetic peptide
RIYPGDGDTDYSGKFKG

SEQ ID NO: 1187 - protein, 12 aa, Artificial Sequence
  Description of Artificial Sequence: Synthetic peptide
SGYFNYVPVFDY

SEQ ID NO: 1188 - protein, 7 aa, Artificial Sequence
  Description of Artificial Sequence: Synthetic peptide
GYTFSGS

SEQ ID NO: 1189 - protein, 6 aa, Artificial Sequence
  Description of Artificial Sequence: Synthetic peptide
YPGDGD

SEQ ID NO: 1190 - protein, 10 aa, Artificial Sequence
  Description of Artificial Sequence: Synthetic peptide
GYTFSGSWMN

SEQ ID NO: 1191 - protein, 10 aa, Artificial Sequence
  Description of Artificial Sequence: Synthetic peptide
SANSTVGYIH

SEQ ID NO: 1192 - protein, 7 aa, Artificial Sequence
  Description of Artificial Sequence: Synthetic peptide
TTSNLAS

SEQ ID NO: 1193 - protein, 8 aa, Artificial Sequence
  Description of Artificial Sequence: Synthetic peptide
HQWSFYPT

SEQ ID NO: 1194 - protein, 6 aa, Artificial Sequence
  Description of Artificial Sequence: Synthetic peptide
NSTVGY

SEQ ID NO: 1195 - protein, 105 aa, Artificial Sequence
  Description of Artificial Sequence: Synthetic polypeptide
QIVLTQSPAIMSASLGEEIALTCSANSTVGYIHWYQQKSGTSPKLLIYTTSNLASGVPSRFSGSGSGTFYSLTISSVEAEDAADYFCHQWSFYPTFGGGTKLEIK

SEQ ID NO: 1196 - protein, 121 aa, Artificial Sequence
  Description of Artificial Sequence: Synthetic polypeptide
QIQLQQSGPEVVKPGASVQISCKASGYTFSGSWMNWVKQRPGKGLEWIGRIYPGDGDTDYSGKFKGRATLTADKSSSTAYMRLSSLTSEDSAVYFCARSGYFNYVPVFDYWGQGTTLSVSS

SEQ ID NO: 1197 - protein, 121 aa, Artificial Sequence
  Description of Artificial Sequence: Synthetic polypeptide
QIQLVQSGAEVKKPGASVKVSCKASGYTFSGSWMNWVRQAPGQGLEWIGRIYPGDGDTDYSGKFKGRATLTADKSTSTAYMELSSLRSEDTAVYYCARSGYFNYVPVFDYWGQGTTVTVSS

SEQ ID NO: 1198 - protein, 121 aa, Artificial Sequence
  Description of Artificial Sequence: Synthetic polypeptide
QIQLVQSGAEVKKPGSSVKVSCKASGYTFSGSWMNWVRQAPGQGLEWIGRIYPGDGDTDYSGKFKGRATLTADKSTSTAYMELSSLRSEDTAVYYCARSGYFNYVPVFDYWGQGTTVTVSS

SEQ ID NO: 1199 - protein, 121 aa, Artificial Sequence
  Description of Artificial Sequence: Synthetic polypeptide
EIQLVQSGAEVKKPGESLKISCKASGYTFSGSWMNWVRQMPGKGLEWIGRIYPGDGDTDYSGKFKGQATLSADKSISTAYLQWSSLKASDTAMYYCARSGYFNYVPVFDYWGQGTTVTVSS

SEQ ID NO: 1200 - protein, 121 aa, Artificial Sequence
  Description of Artificial Sequence: Synthetic polypeptide
QIQLVQSGSELKKPGASVKVSCKASGYTFSGSWMNWVRQAPGQGLEWIGRIYPGDGDTDYSGKFKGRAVLSADKSVSTAYLQISSLKAEDTAVYYCARSGYFNYVPVFDYWGQGTTVTVSS

SEQ ID NO: 1201 - protein, 121 aa, Artificial Sequence
  Description of Artificial Sequence: Synthetic polypeptide
QIQLVQSGSELKKPGASVKVSCKASGYTFSGSWMNWVRQAPGQGLEWIGRIYPGDGDTDYSGKFKGRAVLSADKSVSMAYLQISSLKAEDTAVYYCARSGYFNYVPVFDYWGQGTTVTVSS

SEQ ID NO: 1202 - protein, 121 aa, Artificial Sequence
  Description of Artificial Sequence: Synthetic polypeptide
EIQLVESGGGLVQPGRSLRLSCTASGYTFSGSWMNWVRQAPGKGLEWIGRIYPGDGDTDYSGKFKGRATLSADKSKSIAYLQMNSLKTEDTAVYYCARSGYFNYVPVFDYWGQGTTVTVSS

SEQ ID NO: 1203 - protein, 105 aa, Artificial Sequence
  Description of Artificial Sequence: Synthetic polypeptide
EIVLTQSPATLSLSPGERATLSCSANSTVGYIHWYQQKPGQAPKLLIYTTSNLASGIPARFSGSGSGTDYTLTISSLEPEDFAVYFCHQWSFYPTFGQGTKLEIK

SEQ ID NO: 1204 - protein, 105 aa, Artificial Sequence
  Description of Artificial Sequence: Synthetic polypeptide
DIQLTQSPSFLSASVGDRVTITCSANSTVGYIHWYQQKPGKAPKLLIYTTSNLASGVPSRFSGSGSGTEYTLTISSLQPEDFATYFCHQWSFYPTFGQGTKLEIK

SEQ ID NO: 1205 - protein, 105 aa, Artificial Sequence
  Description of Artificial Sequence: Synthetic polypeptide
EIVLTQSPATLSLSPGERATLSCSANSTVGYIHWYQQKPGQAPKLLIYTTSNLASGIPARFSGSGPGTDYTLTISSLEPEDFAVYFCHQWSFYPTFGQGTKLEIK

SEQ ID NO: 1206 - protein, 105 aa, Artificial Sequence
  Description of Artificial Sequence: Synthetic polypeptide
DIVLTQSPDSLAVSLGERATINCSANSTVGYIHWYQQKPGQPPKLLIYTTSNLASGVPDRFSGSGSGTDYTLTISSLQAEDVAVYFCHQWSFYPTFGQGTKLEIK

SEQ ID NO: 1207 - protein, 105 aa, Artificial Sequence
  Description of Artificial Sequence: Synthetic polypeptide
EIVLTQSPDFQSVTPKEKVTITCSANSTVGYIHWYQQKPDQSPKLLIYTTSNLASGVPSRFSGSGSGTDYTLTINSLEAEDAATYFCHQWSFYPTFGQGTKLEIK

SEQ ID NO: 1208 - protein, 5 aa, Artificial Sequence
  Description of Artificial Sequence: Synthetic peptide
DYYMY

SEQ ID NO: 1209 - protein, 17 aa, Artificial Sequence
  Description of Artificial Sequence: Synthetic peptide
TISGGGSYTYSPDSVKG

SEQ ID NO: 1210 - protein, 14 aa, Artificial Sequence
  Description of Artificial Sequence: Synthetic peptide
ERDIYYGNFNAMVY

SEQ ID NO: 1211 - protein, 7 aa, Artificial Sequence
  Description of Artificial Sequence: Synthetic peptide
GFTFSDY

SEQ ID NO: 1212 - protein, 6 aa, Artificial Sequence
  Description of Artificial Sequence: Synthetic peptide
SGGGSY

SEQ ID NO: 1213 - protein, 10 aa, Artificial Sequence
  Description of Artificial Sequence: Synthetic peptide
GFTFSDYYMY

SEQ ID NO: 1214 - protein, 15 aa, Artificial Sequence
  Description of Artificial Sequence: Synthetic peptide
RASKSVSTSGYSYMH

SEQ ID NO: 1215 - protein, 7 aa, Artificial Sequence
  Description of Artificial Sequence: Synthetic peptide
LASNLES

SEQ ID NO: 1216 - protein, 9 aa, Artificial Sequence
  Description of Artificial Sequence: Synthetic peptide
QHSRDLPWT

SEQ ID NO: 1217 - protein, 11 aa, Artificial Sequence
  Description of Artificial Sequence: Synthetic peptide
SKSVSTSGYSY

SEQ ID NO: 1218 - protein, 111 aa, Artificial Sequence
  Description of Artificial Sequence: Synthetic polypeptide
DIVLTQSPVSLTVSLGQRATISCRASKSVSTSGYSYMHWYQQKPGQPPKLLIYLASNLESGVPARFSGSGSGTDFTLNIHPVEEEDAATYYCQHSRDLPWTFGGGTKLEIK

SEQ ID NO: 1219 - protein, 123 aa, Artificial Sequence
  Description of Artificial Sequence: Synthetic polypeptide
EVQLVESGGGLVKPGGSLKLSCAASGFTFSDYYMYWVRQTPEKRLEWVATISGGGSYTYSPDSVKGRFTISRDNAKNNLYLQMSSLRSEDTAMYFCARERDIYYGNFNAMVYWGRGTSVTVSS

SEQ ID NO: 1220 - protein, 123 aa, Artificial Sequence
  Description of Artificial Sequence: Synthetic polypeptide
EVQLLESGGGLVQPGGSLRLSCAASGFTFSDYYMYWVRQAPGKGLEWVATISGGGSYTYSPDSVKGRFTISRDNSKNTLYLQMNSLRAEDTAVYYCARERDIYYGNFNAMVYWGRGTLVTVSS

SEQ ID NO: 1221 - protein, 123 aa, Artificial Sequence
  Description of Artificial Sequence: Synthetic polypeptide
EVQLVESGGGLVQPGGSLRLSCAASGFTFSDYYMYWVRQAPGKGLEWVATISGGGSYTYSPDSVKGRFTISRDNAKNSLYLQMNSLRAEDTAVYYCARERDIYYGNFNAMVYWGRGTLVTVSS

SEQ ID NO: 1222 - protein, 123 aa, Artificial Sequence
  Description of Artificial Sequence: Synthetic polypeptide
QVQLVESGGGVVQPGRSLRLSCAASGFTFSDYYMYWVRQAPGKGLEWVATISGGGSYTYSPDSVKGRFTISRDNSKNTLYLQMNSLRAEDTAVYYCARERDIYYGNFNAMVYWGRGTLVTVSS

SEQ ID NO: 1223 - protein, 123 aa, Artificial Sequence
  Description of Artificial Sequence: Synthetic polypeptide
QVQLVESGGGLVKPGGSLRLSCAASGFTFSDYYMYWIRQAPGKGLEWVATISGGGSYTYSPDSVKGRFTISRDNAKNSLYLQMNSLRAEDTAVYYCARERDIYYGNFNAMVYWGRGTLVTVSS

SEQ ID NO: 1224 - protein, 111 aa, Artificial Sequence
  Description of Artificial Sequence: Synthetic polypeptide
EIVLTQSPGTLSLSPGERATLSCRASKSVSTSGYSYMHWYQQKPGQAPRLLIYLASNLESGIPDRFSGSGSGTDFTLTISRLEPEDFAVYYCQHSRDLPWTFGGGTKVEIK

SEQ ID NO: 1225 - protein, 111 aa, Artificial Sequence
  Description of Artificial Sequence: Synthetic polypeptide
EIVLTQSPATLSLSPGERATLSCRASKSVSTSGYSYMHWYQQKPGQAPRLLIYLASNLESGIPARFSGSGSGTDFTLTISSLEPEDFAVYYCQHSRDLPWTFGGGTKVEIK

SEQ ID NO: 1226 - protein, 111 aa, Artificial Sequence
  Description of Artificial Sequence: Synthetic polypeptide
DIQLTQSPSTLSASVGDRVTITCRASKSVSTSGYSYMHWYQQKPGKAPKLLIYLASNLESGVPSRFSGSGSGTEFTLTISSLQPDDFATYYCQHSRDLPWTFGGGTKVEIK

SEQ ID NO: 1227 - protein, 111 aa, Artificial Sequence
  Description of Artificial Sequence: Synthetic polypeptide
AIQLTQSPSSLSASVGDRVTITCRASKSVSTSGYSYMHWYQQKPGKAPKLLIYLASNLESGVPSRFSGSGSGTDFTLTISSLQPEDFATYYCQHSRDLPWTFGGGTKVEIK

SEQ ID NO: 1228 - skipped

SEQ ID NO: 1229 - protein, 5 aa, Artificial Sequence
  Description of Artificial Sequence: Synthetic peptide
GYFWN

SEQ ID NO: 1230 - protein, 16 aa, Artificial Sequence
  Description of Artificial Sequence: Synthetic peptide
YISYDGSNNYNPSLKN

SEQ ID NO: 1231 - protein, 11 aa, Artificial Sequence
  Description of Artificial Sequence: Synthetic peptide
PSPGTGYAVDY

SEQ ID NO: 1232 - protein, 8 aa, Artificial Sequence
  Description of Artificial Sequence: Synthetic peptide
GYSITSGY

SEQ ID NO: 1233 - protein, 6 aa, Artificial Sequence
  Description of Artificial Sequence: Synthetic peptide
SYDGSN

SEQ ID NO: 1234 - protein, 11 aa, Artificial Sequence
  Description of Artificial Sequence: Synthetic peptide
GYSITSGYFWN

SEQ ID NO: 1235 - protein, 16 aa, Artificial Sequence
  Description of Artificial Sequence: Synthetic peptide
RSSQSLVHSNGNTYLH

SEQ ID NO: 1236 - protein, 7 aa, Artificial Sequence
  Description of Artificial Sequence: Synthetic peptide
KVSNRFS

SEQ ID NO: 1237 - protein, 9 aa, Artificial Sequence
  Description of Artificial Sequence: Synthetic peptide
SQSTHVPFT

SEQ ID NO: 1238 - protein, 12 aa, Artificial Sequence
  Description of Artificial Sequence: Synthetic peptide
SQSLVHSNGNTY

SEQ ID NO: 1239 - protein, 112 aa, Artificial Sequence
  Description of Artificial Sequence: Synthetic polypeptide
NVVMTQTPLSLPVSLGDQASISCRSSQSLVHSNGNTYLHWYLQKPGQSPKFLIYKVSNRFSGVPDRFSGGGSGTEFTLKISRVEAEDLGVYFCSQSTHVPFTFGSGTKLEIK

SEQ ID NO: 1240 - protein, 120 aa, Artificial Sequence
  Description of Artificial Sequence: Synthetic polypeptide
NVQLQESGPGLVKPSQSLSLTCSVAGYSITSGYFWNWIRQFPGNKLEWMGYISYDGSNNYNPSLKNRISITRDTSKNQFFLKLNSVTTEDTATYYCASPSPGTGYAVDYWGQGTSVTVSS

SEQ ID NO: 1241 - protein, 120 aa, Artificial Sequence
  Description of Artificial Sequence: Synthetic polypeptide
QVQLQESGPGLVKPSETLSLTCTVSGYSITSGYFWNWIRQPPGKGLEWIGYISYDGSNNYNPSLKNRVTISRDTSKNQFSLKLSSVTAADTAVYYCASPSPGTGYAVDYWGQGTLVTVSS

SEQ ID NO: 1242 - protein, 120 aa, Artificial Sequence; identical to SEQ ID NO: 1241
  Description of Artificial Sequence: Synthetic polypeptide

SEQ ID NO: 1243 - protein, 120 aa, Artificial Sequence
  Description of Artificial Sequence: Synthetic polypeptide
QVQLVESGGGLVQPGGSLRLSCSVSGYSITSGYFWNWVRQAPGKGLEWVGYISYDGSNNYNPSLKNRFTISRDTSKNTFYLQMNSLRAEDTAVYYCASPSPGTGYAVDYWGQGTLVTVSS

SEQ ID NO: 1244 - protein, 111 aa, Artificial Sequence
  Description of Artificial Sequence: Synthetic polypeptide
VVMTQSPGTLSLSPGERATLSCRSSQSLVHSNGNTYLHWYQQKPGQAPRFLIYKVSNRFSGIPDRFSGSGSGTDFTLTISRLEPEDFAVYFCSQSTHVPFTFGQGTKLEIK

SEQ ID NO: 1245 - protein, 112 aa, Artificial Sequence
  Description of Artificial Sequence: Synthetic polypeptide
EVVMTQSPATLSLSPGERATLSCRSSQSLVHSNGNTYLHWYQQKPGQAPRFLIYKVSNRFSGIPARFSGSGSGTDFTLTISSLEPEDFAVYFCSQSTHVPFTFGQGTKLEIK

SEQ ID NO: 1246 - protein, 112 aa, Artificial Sequence
  Description of Artificial Sequence: Synthetic polypeptide
EVVMTQSPATLSVSPGERATLSCRSSQSLVHSNGNTYLHWYQQKPGQAPRFLIYKVSNRFSGIPARFSGSGSGTEFTLTISSLQSEDFAVYFCSQSTHVPFTFGQGTKLEIK

SEQ ID NO: 1247 - protein, 112 aa, Artificial Sequence
  Description of Artificial Sequence: Synthetic polypeptide
DVQMTQSPSSLSASVGDRVTITCRSSQSLVHSNGNTYLHWYQQKPGKAPKFLIYKVSNRFSGVPSRFSGSGSGTDFTFTISSLQPEDIATYFCSQSTHVPFTFGQGTKLEIK

SEQ ID NO: 1248 - protein, 5 aa, Artificial Sequence
  Description of Artificial Sequence: Synthetic peptide
DYIVH

SEQ ID NO: 1249 - protein, 17 aa, Artificial Sequence
  Description of Artificial Sequence: Synthetic peptide
WINTYTGTPTYADDFEG

SEQ ID NO: 1250 - protein, 13 aa, Artificial Sequence
  Description of Artificial Sequence: Synthetic peptide
SWRRGIRGIGFDY

SEQ ID NO: 1251 - protein, 7 aa, Artificial Sequence
  Description of Artificial Sequence: Synthetic peptide
GYTFTDY

SEQ ID NO: 1252 - protein, 6 aa, Artificial Sequence
  Description of Artificial Sequence: Synthetic peptide
NTYTGT

SEQ ID NO: 1253 - protein, 10 aa, Artificial Sequence
  Description of Artificial Sequence: Synthetic peptide
GYTFTDYIVH

SEQ ID NO: 1254 - protein, 11 aa, Artificial Sequence
  Description of Artificial Sequence: Synthetic peptide
KASKSINKYLA

SEQ ID NO: 1255 - protein, 7 aa, Artificial Sequence
  Description of Artificial Sequence: Synthetic peptide
DGSTLQS

SEQ ID NO: 1256 - protein, 9 aa, Artificial Sequence
  Description of Artificial Sequence: Synthetic peptide
QQHNEYPPT

SEQ ID NO: 1257 - protein, 7 aa, Artificial Sequence
  Description of Artificial Sequence: Synthetic peptide
SKSINKY

SEQ ID NO: 1258 - protein, 107 aa, Artificial Sequence
  Description of Artificial Sequence: Synthetic polypeptide
DVQMTQSPYNLAASPGESVSINCKASKSINKYLAWYQQKPGKPNKLLIYDGSTLQSGIPSRFSGSGSGTDFTLTIRGLEPEDFGLYYCQQHNEYPPTFGAGTKLELK

SEQ ID NO: 1259 - protein, 122 aa, Artificial Sequence
  Description of Artificial Sequence: Synthetic polypeptide
QLQLVQSGPELREPGESVKISCKASGYTFTDYIVHWVKQAPGKGLKWMGWINTYTGTPTYADDFEGRFVFSLEASASTANLQISNLKNEDTATYFCARSWRRGIRGIGFDYWGQGVMVTVSS

SEQ ID NO: 1260 - protein, 122 aa, Artificial Sequence
  Description of Artificial Sequence: Synthetic polypeptide
QLQLVQSGAEVKKPGASVKVSCKASGYTFTDYIVHWVRQAPGQGLEWMGWINTYTGTPTYADDFEGWVTMTLDASISTAYMELSRLRSDDTAVYYCARSWRRGIRGIGFDYWGQGTMVTVSS

SEQ ID NO: 1261 - protein, 122 aa, Artificial Sequence
  Description of Artificial Sequence: Synthetic polypeptide
QLQLVQSGAEVKKPGASVKVSCKASGYTFTDYIVHWVRQAPGQGLEWMGWINTYTGTPTYADDFEGRVTMTLDASTSTAYMELSSLRSEDTAVYYCARSWRRGIRGIGFDYWGQGTMVTVSS

SEQ ID NO: 1262 - protein, 122 aa, Artificial Sequence
  Description of Artificial Sequence: Synthetic polypeptide
QLQLVQSGAEVKKPGASVKVSCKASGYTFTDYIVHWVRQAPGQRLEWMGWINTYTGTPTYADDFEGRVTITLDASASTAYMELSSLRSEDMAVYYCARSWRRGIRGIGFDYWGQGTMVTVSS

SEQ ID NO: 1263 - protein, 122 aa, Artificial Sequence
  Description of Artificial Sequence: Synthetic polypeptide
QLQLVQSGAEVKKPGASVKVSCKASGYTFTDYIVHWVRQATGQGLEWMGWINTYTGTPTYADDFEGRVTMTLNASISTAYMELSSLRSEDTAVYYCARSWRRGIRGIGFDYWGQGTMVTVSS

SEQ ID NO: 1264 - protein, 107 aa, Artificial Sequence
  Description of Artificial Sequence: Synthetic polypeptide
EVVMTQSPGTLSLSPGERATLSCKASKSINKYLAWYQQKPGQAPRLLIYDGSTLQSGIPDRFSGSGSGTDFTLTISRLEPEDFAVYYCQQHNEYPPTFGQGTKLEIK

SEQ ID NO: 1265 - protein, 107 aa, Artificial Sequence
  Description of Artificial Sequence: Synthetic polypeptide
EVVMTQSPATLSLSPGERATLSCKASKSINKYLAWYQQKPGQAPRLLIYDGSTLQSGIPARFSGSGSGTDFTLTISSLEPEDFAVYYCQQHNEYPPTFGQGTKLEIK

SEQ ID NO: 1266 - protein, 107 aa, Artificial Sequence
  Description of Artificial Sequence: Synthetic polypeptide
DVQMTQSPSSLSASVGDRVTITCKASKSINKYLAWYQQKPGKAPKLLIYDGSTLQSGVPSRFSGSGSGTDFTLTISSLQPEDFATYYCQQHNEYPPTFGQGTKLEIK

SEQ ID NO: 1267 - protein, 107 aa, Artificial Sequence
  Description of Artificial Sequence: Synthetic polypeptide
AVRMTQSPSSFSASTGDRVTITCKASKSINKYLAWYQQKPGKAPKLLIYDGSTLQSGVPSRFSGSGSGTDFTLTISCLQSEDFATYYCQQHNEYPPTFGQGTKLEIK

SEQ ID NO: 1268 - protein, 5 aa, Artificial Sequence
  Description of Artificial Sequence: Synthetic peptide
NYGVH

SEQ ID NO: 1269 - protein, 16 aa, Artificial Sequence
  Description of Artificial Sequence: Synthetic peptide
VIWSDGSTDYDTAFIS

SEQ ID NO: 1270 - protein, 9 aa, Artificial Sequence
  Description of Artificial Sequence: Synthetic peptide
RAVVADFDY

SEQ ID NO: 1271 - protein, 6 aa, Artificial Sequence
  Description of Artificial Sequence: Synthetic peptide
GFSLTN

SEQ ID NO: 1272 - protein, 9 aa, Artificial Sequence
  Description of Artificial Sequence: Synthetic peptide
VIWSDGSTD

SEQ ID NO: 1273 - protein, 10 aa, Artificial Sequence
  Description of Artificial Sequence: Synthetic peptide
GFSLTNYGVH

SEQ ID NO: 1274 - protein, 117 aa, Artificial Sequence
  Description of Artificial Sequence: Synthetic polypeptide
QVQLKQSGPGLLQPSQSLSITCTVSGFSLTNYGVHWVRQSPGKGLEWLGVIWSDGSTDYDTAFISRLSISKDNSKSQVFFKLNSLQADDTAIYYCARRAVVADFDYWGQGTTLTVSS

SEQ ID NO: 1275 - protein, 16 aa, Artificial Sequence
  Description of Artificial Sequence: Synthetic peptide
KASKEVTIFGSISALH

SEQ ID NO: 1276 - protein, 7 aa, Artificial Sequence
  Description of Artificial Sequence: Synthetic peptide
NGAKLES

SEQ ID NO: 1277 - protein, 9 aa, Artificial Sequence
  Description of Artificial Sequence: Synthetic peptide
LQNKEVPFT

SEQ ID NO: 1278 - protein, 119 aa, Artificial Sequence
  Description of Artificial Sequence: Synthetic polypeptide
DIVLTQSPASLAVSLGQKATISCKASKEVTIFGSISALHWYQQKPGQPPKLIYNGAKLESGVSARFSDSGSQNRSPFGNQLSFTLTIAPVEADDAATYYCLQNKEVPFTFGSGTKLEIK

SEQ ID NO: 1279 - protein, 117 aa, Artificial Sequence
  Description of Artificial Sequence: Synthetic polypeptide
DIVLTQSPDSLAVSLGERATINCKASKEVTIFGSISALHWYQQKPGQPPKLLYNGAKLESGVSARFGVPDRFSRSGSGLDFTLTISSLQAEDVAVYYCLQNKEVPFTFGQGTKLEIK

SEQ ID NO: 1280 - protein, 117 aa, Artificial Sequence
  Description of Artificial Sequence: Synthetic polypeptide
EIVLTQSPDFQSVTPKEKVTITCKASKEVTIFGSISALHWYQQKPDQSPKLLYNGAKLESGVSARFGVPSRFSRSGSGLDFTLTINSLEAEDAATYYCLQNKEVPFTFGQGTKLEIK

SEQ ID NO: 1281 - protein, 117 aa, Artificial Sequence
  Description of Artificial Sequence: Synthetic polypeptide
AIQLTQSPSSLSASVGDRVTITCKASKEVTIFGSISALHWYQQKPGKAPKLLYNGAKLESGVSARFGVPSRFSRSGSGLDFTLTISSLQPEDFATYYCLQNKEVPFTFGQGTKLEIK

SEQ ID NO: 1282 - protein, 117 aa, Artificial Sequence
  Description of Artificial Sequence: Synthetic polypeptide
DIVLTQTPLSLSVTPGQPASISCKASKEVTIFGSISALHWYLQKPGQPPKLLYNGAKLESGVSARFGVPDRFSRSGSGLDFTLKISRVEAEDVGVYYCLQNKEVPFTFGQGTKLEIK

SEQ ID NO: 1283 - protein, 117 aa, Artificial Sequence
  Description of Artificial Sequence: Synthetic polypeptide
QVTLKESGPVLVKPTETLTLTCTVSGFSLTNYGVHWVRQPPGKALEWLGVIWSDGSTDYDTAFISRLTISKDNSKSQVVLTMTNMDPVDTATYYCARRAVVADFDYWGQGTTVTVSS

SEQ ID NO: 1284 - protein, 117 aa, Artificial Sequence
  Description of Artificial Sequence: Synthetic polypeptide
QVQLQESGPGLVKPSGTLSLTCAVSGFSLTNYGVHWVRQPPGKGLEWLGVIWSDGSTDYDTAFISRLTISKDNSKSQVSLKLSSVTAADTAVYYCARRAVVADFDYWGQGTTVTVSS

SEQ ID NO: 1285 - protein, 117 aa, Artificial Sequence
  Description of Artificial Sequence: Synthetic polypeptide
QVQLQQSGPGLVKPSQTLSLTCAVSGFSLTNYGVHWVRQSPSRGLEWLGVIWSDGSTDYDTAFISRLTINKDNSKSQVSLQLNSVTPEDTAVYYCARRAVVADFDYWGQGTTVTVSS

SEQ ID NO: 1286 - protein, 117 aa, Artificial Sequence
  Description of Artificial Sequence: Synthetic polypeptide
EVQLVESGGGLVQPGPSLRLSCTVSGFSLTNYGVHWVRQAPGKGLEWLGVIWSDGSTDYDTAFISRLTISKDNSKSIVYLQMNSLKTEDTAVYYCARRAVVADFDYWGQGTTVTVSS

SEQ ID NO: 1287 - protein, 117 aa, Artificial Sequence
  Description of Artificial Sequence: Synthetic polypeptide
EVQLVQSGAEVKKPGESLRISCKVSGFSLTNYGVHWVRQMPGKGLEWLGVIWSDGSTDYDTAFISQLTISKDNSISTVYLQWSSLKASDTAMYYCARRAVVADFDYWGQGTTVTVSS

SEQ ID NO: 1288 - protein, 5 aa, Artificial Sequence
  Description of Artificial Sequence: Synthetic peptide
SYGMS

SEQ ID NO: 1289 - protein, 17 aa, Artificial Sequence
  Description of Artificial Sequence: Synthetic peptide
LISSGGSYTYYTDSVKG

SEQ ID NO: 1290 - protein, 8 aa, Artificial Sequence
  Description of Artificial Sequence: Synthetic peptide
HGGNFFDY

SEQ ID NO: 1291 - protein, 7 aa, Artificial Sequence
  Description of Artificial Sequence: Synthetic peptide
GFTFRSY

SEQ ID NO: 1292 - protein, 6 aa, Artificial Sequence
  Description of Artificial Sequence: Synthetic peptide
SSGGSY

SEQ ID NO: 1293 - protein, 10 aa, Artificial Sequence
  Description of Artificial Sequence: Synthetic peptide
GFTFRSYGMS

SEQ ID NO: 1294 - protein, 10 aa, Artificial Sequence
  Description of Artificial Sequence: Synthetic peptide
SVSSSVSYMH

SEQ ID NO: 1295 - protein, 7 aa, Artificial Sequence
  Description of Artificial Sequence: Synthetic peptide
DTSKLAS

SEQ ID NO: 1296 - protein, 10 aa, Artificial Sequence
  Description of Artificial Sequence: Synthetic peptide
QQWSSNPQYT

SEQ ID NO: 1297 - protein, 6 aa, Artificial Sequence
  Description of Artificial Sequence: Synthetic peptide
SSSVSY

SEQ ID NO: 1298 - protein, 5 aa, Artificial Sequence
  Description of Artificial Sequence: Synthetic peptide
SSWMN

SEQ ID NO: 1299 - protein, 17 aa, Artificial Sequence
  Description of Artificial Sequence: Synthetic peptide
RIYPGDGDTKYNGKFKG

SEQ ID NO: 1300 - protein, 10 aa, Artificial Sequence
  Description of Artificial Sequence: Synthetic peptide
RGTGGWYFDV

SEQ ID NO: 1301 - protein, 10 aa, Artificial Sequence
  Description of Artificial Sequence: Synthetic peptide
RGTGGWYFDV

SEQ ID NO: 1302 - protein, 7 aa, Artificial Sequence
  Description of Artificial Sequence: Synthetic peptide
GYAFSSS

SEQ ID NO: 1303 - protein, 6 aa, Artificial Sequence
  Description of Artificial Sequence: Synthetic peptide
YPGDGD

SEQ ID NO: 1304 - protein, 10 aa, Artificial Sequence
  Description of Artificial Sequence: Synthetic peptide
GYAFSSSWMN

SEQ ID NO: 1305 - protein, 15 aa, Artificial Sequence
  Description of Artificial Sequence: Synthetic peptide
RASESVDSSGNSFMH

SEQ ID NO: 1306 - protein, 7 aa, Artificial Sequence
  Description of Artificial Sequence: Synthetic peptide
RASNLES

SEQ ID NO: 1307 - protein, 9 aa, Artificial Sequence
  Description of Artificial Sequence: Synthetic peptide
QQSFDDPFT

SEQ ID NO: 1308 - protein, 11 aa, Artificial Sequence
  Description of Artificial Sequence: Synthetic peptide
SESVDSSGNSF

SEQ ID NO: 1309 - protein, 246 aa, Artificial Sequence
  Description of Artificial Sequence: Synthetic polypeptide
QVQLVQSGAEVKKPGSSVKVSCKASGHDFDKFYIHWVRQAPGQGLEWMGRVSAGSGNVKYNEKFKGRVTITADTSTSTAYMELSSLRSEDTAVYYCAGSYYSYDVLDYWGQGTTVTVSSGGGGSGGGGSGGGGSGGGGSDIQMTQSPSFLSASVGDRVTITCKASQNVGNRVAWYQQKPGKAPKALIYSSSHRYKGVPSRFSGSGSGTEFTLTISSLQPEDFATYFCQQFKSYPLTFGQGTKLEIK

SEQ ID NO: 1310 - protein, 119 aa, Artificial Sequence; identical to SEQ ID NO: 94
  Description of Artificial Sequence: Synthetic polypeptide

SEQ ID NO: 1311 - protein, 119 aa, Artificial Sequence
  Description of Artificial Sequence: Synthetic polypeptide
QVQLVQSGAEVKKPGSSVKVSCKASGTDFKLTYIHWVRQAPGQGLEWMGRIFPGSGNVKYNEKFKGRVTITADTSTSTAYMELSSLRSEDTAVYYCAVSYYSYDVLDYWGQGTTVTVSS

SEQ ID NO: 1312 - protein, 119 aa, Artificial Sequence
  Description of Artificial Sequence: Synthetic polypeptide
QVQLVQSGAEVKKPGSSVKVSCKASGHDFRLTYIHWVRQAPGQGLEWMGRISAGSGNVKYNEKFKGRVTITADTSTSTAYMELSSLRSEDTAVYYCAVSYYSYDVLDYWGQGTTVTVSS

SEQ ID NO: 1313 - protein, 107 aa, Artificial Sequence; identical to SEQ ID NO: 90
  Description of Artificial Sequence: Synthetic polypeptide

SEQ ID NO: 1314 - protein, 107 aa, Artificial Sequence; identical to SEQ ID NO: 141
  Description of Artificial Sequence: Synthetic polypeptide

SEQ ID NO: 1315 - protein, 5 aa, Artificial Sequence
  Description of Artificial Sequence: Synthetic peptide
AYGVN

SEQ ID NO: 1316 - protein, 16 aa, Artificial Sequence
  Description of Artificial Sequence: Synthetic peptide
MIWGDGNTDYNSALKS

SEQ ID NO: 1317 - protein, 12 aa, Artificial Sequence
  Description of Artificial Sequence: Synthetic peptide
DRVTATLYAMDY

SEQ ID NO: 1318 - protein, 7 aa, Artificial Sequence
  Description of Artificial Sequence: Synthetic peptide
GFSLTAY

SEQ ID NO: 1319 - protein, 5 aa, Artificial Sequence
  Description of Artificial Sequence: Synthetic peptide
WGDGN

SEQ ID NO: 1320 - protein, 10 aa, Artificial Sequence
  Description of Artificial Sequence: Synthetic peptide
GFSLTAYGVN

SEQ ID NO: 1321 - protein, 11 aa, Artificial Sequence
  Description of Artificial Sequence: Synthetic peptide
SASQGISNYLN

SEQ ID NO: 1322 - protein, 7 aa, Artificial Sequence
  Description of Artificial Sequence: Synthetic peptide
YTSSLHS

SEQ ID NO: 1323 - protein, 9 aa, Artificial Sequence
  Description of Artificial Sequence: Synthetic peptide
QQYSKLPRT

SEQ ID NO: 1324 - protein, 107 aa, Artificial Sequence
  Description of Artificial Sequence: Synthetic polypeptide
DIQMTQSPSSLSASVGDRVTITCSASQGISNYLNWYQQTPGKAPKLLIYYTSSLHSGVPSRFSGSGSGTDYTFTISSLQPEDIATYYCQQYSKLPRTFGQGTKLQIT

SEQ ID NO: 1325 - protein, 120 aa, Artificial Sequence
  Description of Artificial Sequence: Synthetic polypeptide
QVQLQESGPGLVRPSQTLSLTCTVSGFSLTAYGVNWVRQPPGRGLEWLGMIWGDGNTDYNSALKSRVTMLKDTSKNQFSLRLSSVTAADTAVYYCARDRVTATLYAMDYWGQGSLVTVSS

SEQ ID NO: 1326 - protein, 246 aa, Artificial Sequence
  Description of Artificial Sequence: Synthetic polypeptide
QVQLVQSGAEVKKPGSSVKVSCKASGHDFRLTYIHWVRQAPGQGLEWMGRVSAGSGNTKYNEKFKGRVTITADTSTSTAYMELSSLRSEDTAVYYCAVSYYSYDVLDYWGQGTTVTVSSGGGGSGGGGSGGGGSGGGGSDIQMTQSPSFLSASVGDRVTITCKASQNVGDRVVWHQQKPGKAPKALIYSSSHRYKGVPSRFSGSGSGTEFTLTISSLQPEDFATYFCQQFKSYPLTFGQGTKLEIK

SEQ ID NO: 1327 - protein, 246 aa, Artificial Sequence
  Description of Artificial Sequence: Synthetic polypeptide
QVQLVQSGAEVKKPGSSVKVSCKASGHDFRLTYIHWVRQAPGQGLEWMGRVSAGSGNVKYNEKFKGRVTITADTSTSTAYMELSSLRSEDTAVYYCAVSYYSYDVLDYWGQGTTVTVSSGGGGSGGGGSGGGGSGGGGSDIQMTQSPSFLSASVGDRVTITCKASQNVGNRVVWHQQKPGKAPKALIYSSSHRYKGVPSRFSGSGSGTEFTLTISSLQPEDFATYFCQQFKSYPLTFGQGTKLEIK

SEQ ID NO: 1328 - protein, 246 aa, Artificial Sequence
  Description of Artificial Sequence: Synthetic polypeptide
QVQLVQSGAEVKKPGSSVKVSCKASGHDFRLTYIHWVRQAPGQGLEWMGRIYAGSGNVKYNEKFKGRVTITADTSTSTAYMELSSLRSEDTAVYYCAVSYYSYDVLDYWGQGTTVTVSSGGGGSGGGGSGGGGSGGGGSDIQMTQSPSFLSASVGDRVTITCKASQNVADRVVWHQQKPGKAPKALIYSSSHRYKGVPSRFSGSGSGTEFTLTISSLQPEDFATYFCQQFKSYPLTFGQGTKLEIK

SEQ ID NO: 1329 - protein, 246 aa, Artificial Sequence
  Description of Artificial Sequence: Synthetic polypeptide
QVQLVQSGAEVKKPGSSVKVSCKASGHDFKLTYIHWVRQAPGQGLEWMGRVSAGSGNTKYNEKFKGRVTITADTSTSTAYMELSSLRSEDTAVYYCAVSYYSYDVLDYWGQGTTVTVSSGGGGSGGGGSGGGGSGGGGSDIQMTQSPSFLSASVGDRVTITCKASQNVGDRVAWHQQKPGKAPKALIYSSSHRYKGVPSRFSGSGSGTEFTLTISSLQPEDFATYFCQQFKSYPLTFGQGTKLEIK

SEQ ID NO: 1330 - protein, 246 aa, Artificial Sequence
  Description of Artificial Sequence: Synthetic polypeptide
QVQLVQSGAEVKKPGSSVKVSCKASGHDFKLTYIHWVRQAPGQGLEWMGRVSAGSGNTKYNEKFKGRVTITADTSTSTAYMELSSLRSEDTAVYYCAVSYYSYDVLDYWGQGTTVTVSSGGGGSGGGGSGGGGSGGGGSDIQMTQSPSFLSASVGDRVTITCKASQNVDNRVAWHQQKPGKAPKALIYSSSHRYKGVPSRFSGSGSGTEFTLTISSLQPEDFATYFCQQFKSYPLTFGQGTKLEIK

SEQ ID NO: 1331 - protein, 246 aa, Artificial Sequence
  Description of Artificial Sequence: Synthetic polypeptide
QVQLVQSGAEVKKPGSSVKVSCKASGHDFRLTYIHWVRQAPGQGLEWMGRVSAGSGNVKYNEKFKGRVTITADTSTSTAYMELSSLRSEDTAVYYCAVSYYSYDVLDYWGQGTTVTVSSGGGGSGGGGSGGGGSGGGGSDIQMTQSPSFLSASVGDRVTITCKASQNVADRVVWHQQKPGKAPKALIYSSSHRYKGVPSRFSGSGSGTEFTLTISSLQPEDFATYFCQQFKSYPLTFGQGTKLEIK

SEQ ID NO: 1332 - protein, 246 aa, Artificial Sequence
  Description of Artificial Sequence: Synthetic polypeptide
QVQLVQSGAEVKKPGSSVKVSCKASGHDFRLTYIHWVRQAPGQGLEWMGRVYAGSGNTKYNEKFKGRVTITADTSTSTAYMELSSLRSEDTAVYYCAVSYYSYDVLDYWGQGTTVTVSSGGGGSGGGGSGGGGSGGGGSDIQMTQSPSFLSASVGDRVTITCKASQNVEDRVVWHQQKPGKAPKALIYSSSHRYKGVPSRFSGSGSGTEFTLTISSLQPEDFATYFCQQFKSYPLTFGQGTKLEIK

SEQ ID NO: 1333 - protein, 246 aa, Artificial Sequence
  Description of Artificial Sequence: Synthetic polypeptide
QVQLVQSGAEVKKPGSSVKVSCKASGHDFKLTYIHWVRQAPGQGLEWMGRVSAGSGNTKYNEKFKGRVTITADTSTSTAYMELSSLRSEDTAVYYCAVSYYSYDVLDYWGQGTTVTVSSGGGGSGGGGSGGGGSGGGGSDIQMTQSPSFLSASVGDRVTITCKASQNVADRVVWHQQKPGKAPKALIYSSSHRYKGVPSRFSGSGSGTEFTLTISSLQPEDFATYFCQQFKSYPLTFGQGTKLEIK

SEQ ID NO: 1334 - protein, 246 aa, Artificial Sequence
  Description of Artificial Sequence: Synthetic polypeptide
QVQLVQSGAEVKKPGSSVKVSCKASGHDFKLTYIHWVRQAPGQGLEWMGRISAGSGNTKYNEKFKGRVTITADTSTSTAYMELSSLRSEDTAVYYCAVSYYSYDVLDYWGQGTTVTVSSGGGGSGGGGSGGGGSGGGGSDIQMTQSPSFLSASVGDRVTITCKASQNVGDRVVWHQQKPGKAPKALIYSSSHRYKGVPSRFSGSGSGTEFTLTISSLQPEDFATYFCQQFKSYPLTFGQGTKLEIK

SEQ ID NO: 1335 - protein, 246 aa, Artificial Sequence
  Description of Artificial Sequence: Synthetic polypeptide
QVQLVQSGAEVKKPGSSVKVSCKASGHDFKLTYIHWVRQAPGQGLEWMGRIYAGSGNTKYNEKFKGRVTITADTSTSTAYMELSSLRSEDTAVYYCAVSYYSYDVLDYWGQGTTVTVSSGGGGSGGGGSGGGGSGGGGSDIQMTQSPSFLSASVGDRVTITCKASQNVGDRVVWHQQKPGKAPKALIYSSSHRYKGVPSRFSGSGSGTEFTLTISSLQPEDFATYFCQQFKSYPLTFGQGTKLEIK

SEQ ID NO: 1336 - protein, 246 aa, Artificial Sequence
  Description of Artificial Sequence: Synthetic polypeptide
QVQLVQSGAEVKKPGSSVKVSCKASGTDFKLTYIHWVRQAPGQGLEWMGRIFPGSGNVKYNEKFKGRVTITADTSTSTAYMELSSLRSEDTAVYYCAVSYYSYDVLDYWGQGTTVTVSSGGGGSGGGGSGGGGSGGGGSDIQMTQSPSFLSASVGDRVTITCKASQNVDNRVAWYQQKPGKAPKALIYSSSHRYKGVPSRFSGSGSGTEFTLTISSLQPEDFATYFCQQFKSYPLTFGQGTKLEIK

SEQ ID NO: 1337 - protein, 246 aa, Artificial Sequence
  Description of Artificial Sequence: Synthetic polypeptide
QVQLVQSGAEVKKPGSSVKVSCKASGHDFRLTYIHWVRQAPGQGLEWMGRISAGSGNVKYNEKFKGRVTITADTSTSTAYMELSSLRSEDTAVYYCAVSYYSYDVLDYWGQGTTVTVSSGGGGSGGGGSGGGGSGGGGSDIQMTQSPSFLSASVGDRVTITCKASQNVADRVAWYQQKPGKAPKALIYSSSHRYKGVPSRFSGSGSGTEFTLTISSLQPEDFATYFCQQFKSYPLTFGQGTKLEIK

SEQ ID NO: 1338 - protein, 243 aa, Artificial Sequence
  Description of Artificial Sequence: Synthetic polypeptide
EVQLVESGGGLVQPGGSLRLSCAASGFTFSNFGMHWVRQAPGKGLEWVSYISSGSSTIYYADTLKGRFTISRDNSKNTLYLQMNSLRAEDTAVYYCARRGEGAMDYWGQGTTVTVSSGGGGSGGGGSGGGGSGGGGSDNQLTQSPSSLSASVGDRVTITCRASSSVNYIYWYQQKPGKAPKLLIYYTSNLAPGVPSRFSGSGSGNDYTLTISSLQPEDFATYYCQQFTSSPFTFGQGTKLEIK

SEQ ID NO: 1339 - protein, 242 aa, Artificial Sequence
  Description of Artificial Sequence: Synthetic polypeptide
EVQLVESGGGLVQPGGSLRLSCAASGFTFSNFGMHWVRQAPGKGLEWVSYISSGSSTIYYADTLKGRFTISRDNSKNTLYLQMNSLRAEDTAVYYCARRGEGAMDYWGQGTTVTVSSGGGGSGGGGSGGGGSGGGGSSNELTQPPSVSVSPGQTARITCRASSSVNYIYWYQQKSGQAPVLVIYYTSNLAPGIPERFSGSGSGNMYTLTISGAQVEDEADYYCQQFTSSPFTFGTGTKVTVL

SEQ ID NO: 1340 - protein, 243 aa, Artificial Sequence
  Description of Artificial Sequence: Synthetic polypeptide
QVQLVESGGGVVQPGRSLRLSCAASGFTFSNFGMHWVRQAPGKGLEWVAYISSGSSTIYYADTLKGRFTISRDNSKNTLYLQMNSLRAEDTAVYYCARRGEGAMDYWGQGTTVTVSSGGGGSGGGGSGGGGSGGGGSDNQLTQSPSFLSASVGDRVTITCRASSSVNYIYWYQQKPGKAPKLLIYYTSNLAPGVPSRFSGSGSGNEYTLTISSLQPEDFATYYCQQFTSSPFTFGQGTKLEIK

SEQ ID NO: 1341 - protein, 243 aa, Artificial Sequence
  Description of Artificial Sequence: Synthetic polypeptide
QVQLVESGGGVVQPGRSLRLSCAASGFTFSNFGMHWVRQAPGKGLEWVAYISSGSSTIYYADTLKGRFTISRDNSKNTLYLQMNSLRAEDTAVYYCARRGEGAMDYWGQGTTVTVSSGGGGSGGGGSGGGGSGGGGSDNQLTQSPSSLSASVGDRVTITCRASSSVNYIYWYQQKPGKAPKLLIYYTSNLAPGVPSRFSGSGSGNDYTLTISSLQPEDFATYYCQQFTSSPFTFGQGTKLEIK

SEQ ID NO: 1342 - protein, 242 aa, Artificial Sequence
  Description of Artificial Sequence: Synthetic polypeptide
QVQLVESGGGVVQPGRSLRLSCAASGFTFSNFGMHWVRQAPGKGLEWVAYISSGSSTIYYADTLKGRFTISRDNSKNTLYLQMNSLRAEDTAVYYCARRGEGAMDYWGQGTTVTVSSGGGGSGGGGSGGGGSGGGGSSNELTQPPSVSVSPGQTARITCRASSSVNYIYWYQQKSGQAPVLVIYYTSNLAPGIPERFSGSGSGNMYTLTISGAQVEDEADYYCQQFTSSPFTFGTGTKVTVL

SEQ ID NO: 1343 - skipped

SEQ ID NO: 1344 - protein, 119 aa, Artificial Sequence
  Description of Artificial Sequence: Synthetic polypeptide
QVQLVQSGAEVKKPGSSVKVSCKASGHDFRLTYIHWVRQAPGQGLEWMGRVSAGSGNTKYNEKFKGRVTITADTSTSTAYMELSSLRSEDTAVYYCAVSYYSYDVLDYWGQGTTVTVSS

SEQ ID NO: 1345 - skipped

SEQ ID NO: 1346 - protein, 119 aa, Artificial Sequence
  Description of Artificial Sequence: Synthetic polypeptide
QVQLVQSGAEVKKPGSSVKVSCKASGHDFRLTYIHWVRQAPGQGLEWMGRVSAGSGNVKYNEKFKGRVTITADTSTSTAYMELSSLRSEDTAVYYCAVSYYSYDVLDYWGQGTTVTVSS

SEQ ID NO: 1347 - protein, 107 aa, Artificial Sequence
  Description of Artificial Sequence: Synthetic polypeptide
DIQMTQSPSFLSASVGDRVTITCKASQNVGNRVVWHQQKPGKAPKALIYSSSHRYKGVPSRFSGSGSGTEFTLTISSLQPEDFATYFCQQFKSYPLTFGQGTKLEIK

SEQ ID NO: 1348 - protein, 119 aa, Artificial Sequence
  Description of Artificial Sequence: Synthetic polypeptide
QVQLVQSGAEVKKPGSSVKVSCKASGHDFRLTYIHWVRQAPGQGLEWMGRIYAGSGNVKYNEKFKGRVTITADTSTSTAYMELSSLRSEDTAVYYCAVSYYSYDVLDYWGQGTTVTVSS

SEQ ID NO: 1349 - protein, 107 aa, Artificial Sequence
  Description of Artificial Sequence: Synthetic polypeptide
DIQMTQSPSFLSASVGDRVTITCKASQNVADRVVWHQQKPGKAPKALIYSSSHRYKGVPSRFSGSGSGTEFTLTISSLQPEDFATYFCQQFKSYPLTFGQGTKLEIK

SEQ ID NO: 1350 - protein, 119 aa, Artificial Sequence
  Description of Artificial Sequence: Synthetic polypeptide
QVQLVQSGAEVKKPGSSVKVSCKASGHDFKLTYIHWVRQAPGQGLEWMGRVSAGSGNTKYNEKFKGRVTITADTSTSTAYMELSSLRSEDTAVYYCAVSYYSYDVLDYWGQGTTVTVSS

SEQ ID NO: 1351 - protein, 107 aa, Artificial Sequence; identical to SEQ ID NO: 160
  Description of Artificial Sequence: Synthetic polypeptide

SEQ ID NO: 1352 - skipped

SEQ ID NO: 1353 - protein, 107 aa, Artificial Sequence; identical to SEQ ID NO: 199
  Description of Artificial Sequence: Synthetic polypeptide

SEQ ID NO: 1354-1355 - skipped (2 entries)

SEQ ID NO: 1356 - protein, 119 aa, Artificial Sequence
  Description of Artificial Sequence: Synthetic polypeptide
QVQLVQSGAEVKKPGSSVKVSCKASGHDFRLTYIHWVRQAPGQGLEWMGRVYAGSGNTKYNEKFKGRVTITADTSTSTAYMELSSLRSEDTAVYYCAVSYYSYDVLDYWGQGTTVTVSS

SEQ ID NO: 1357 - protein, 107 aa, Artificial Sequence
  Description of Artificial Sequence: Synthetic polypeptide
DIQMTQSPSFLSASVGDRVTITCKASQNVEDRVVWHQQKPGKAPKALIYSSSHRYKGVPSRFSGSGSGTEFTLTISSLQPEDFATYFCQQFKSYPLTFGQGTKLEIK

SEQ ID NO: 1358-1359 - skipped (2 entries)

SEQ ID NO: 1360 - protein, 119 aa, Artificial Sequence
  Description of Artificial Sequence: Synthetic polypeptide
QVQLVQSGAEVKKPGSSVKVSCKASGHDFKLTYIHWVRQAPGQGLEWMGRISAGSGNTKYNEKFKGRVTITADTSTSTAYMELSSLRSEDTAVYYCAVSYYSYDVLDYWGQGTTVTVSS

SEQ ID NO: 1361 - protein, 107 aa, Artificial Sequence
  Description of Artificial Sequence: Synthetic polypeptide
DIQMTQSPSFLSASVGDRVTITCKASQNVGDRVVWHQQKPGKAPKALIYSSSHRYKGVPSRFSGSGSGTEFTLTISSLQPEDFATYFCQQFKSYPLTFGQGTKLEIK

SEQ ID NO: 1362 - protein, 119 aa, Artificial Sequence
  Description of Artificial Sequence: Synthetic polypeptide
QVQLVQSGAEVKKPGSSVKVSCKASGHDFKLTYIHWVRQAPGQGLEWMGRIYAGSGNTKYNEKFKGRVTITADTSTSTAYMELSSLRSEDTAVYYCAVSYYSYDVLDYWGQGTTVTVSS

SEQ ID NO: 1363-1364 - skipped (2 entries)

SEQ ID NO: 1365 - protein, 107 aa, Artificial Sequence
  Description of Artificial Sequence: Synthetic polypeptide
DIQMTQSPSFLSASVGDRVTITCRASQNVDNRLGWHQQKPGKAPKALIYSSSHRYKGVPSRFSGSGSGTEFTLTISSLQPEDFATYFCQQFKSYPLTFGQGTKLEIK

SEQ ID NO: 1366 - skipped

SEQ ID NO: 1367 - protein, 107 aa, Artificial Sequence
  Description of Artificial Sequence: Synthetic polypeptide
DIQMTQSPSFLSASVGDRVTITCKASQNVDNRVAWHQQKPGKAPKALIYAASSLQKGVPSRFSGSGSGTEFTLTISSLQPEDFATYFCQQFKSYPLTFGQGTKLEIK

SEQ ID NO: 1368 - skipped

SEQ ID NO: 1369 - protein, 107 aa, Artificial Sequence
  Description of Artificial Sequence: Synthetic polypeptide
DIQMTQSPSFLSASVGDRVTITCKASQNVDNRVAWHQQKPGKAPKALIYSSSHRYKGVPSRFSGSGSGTEFTLTISSLQPEDFATYFCLQHNSYPLTFGQGTKLEIK

SEQ ID NO: 1370 - protein, 119 aa, Artificial Sequence
  Description of Artificial Sequence: Synthetic polypeptide
QVQLVQSGAEVKKPGSSVKVSCKASGHDFKLTYIHWVRQAPGQGLEWMGRVSAGSGNVNYAQKFQGRVTITADTSTSTAYMELSSLRSEDTAVYYCAVSYYSYDVLDYWGQGTTVTVSS

SEQ ID NO: 1371-1375 - skipped (5 entries)

SEQ ID NO: 1376 - protein, 252 aa, Artificial Sequence
  Description of Artificial Sequence: Synthetic polypeptide
QVQLQQSGTELMKPGASVKISCKASGYTFSNYWIEWIKQRPGHGLEWVGEILPGAGPTNYNEKFKGKATFTADSSSNTAYMQLSSLTSEDSAVYYCARTDYDYDWFAYWGQGTLVTVSAGGGGSGGGGSGGGGSGGGGSDIVMSQSPSSLAVSVGEKVTMSCKSSQSLLYSGNQKNYLAWYQQKPGQSPKLLIYWASTRESGVPDRFTGSGSGTDFTLTINSVKAEDLTVYYCQQYYGYPRTFGGGTKVEIK

SEQ ID NO: 1377-2169 - skipped (793 entries)

SEQ ID NO: 2170 - protein, 114 aa, Homo sapiens
NWVNVISDLKKIEDLIQSMHIDATLYTESDVHPSCKVTAMKCFLLELQVISLESGDASIHDTVENLIILANNSLSSNGNVTESGCKECEELEEKNIKEFLQSFVHIVQMFINTS

SEQ ID NO: 2171-2179 - skipped (9 entries)

SEQ ID NO: 2180 - protein, 77 aa, Unknown
  Description of Unknown: IL15Ralpha sequence
MAPRRARGCRTLGLPALLLLLLLRPPATRGITCPPPMSVEHADIWVKSYSLYSRERYICNSGFKRKAGTSSLTECVL

SEQ ID NO: 2181-2189 - skipped (9 entries)

SEQ ID NO: 2190 - protein, 20 aa, Artificial Sequence
  Description of Artificial Sequence: Synthetic peptide
SGGSGGGGSGGGSGGGGSLQ

SEQ ID NO: 2191 - protein, 133 aa, Homo sapiens [sequence omitted]

SEQ ID NO: 2192 - protein, 157 aa, Homo sapiens
YFGKLESKLSVIRNLNDQVLFIDQGNRPLFEDMTDSDCRDNAPRTIFIISMYKDSQPRGMAVTISVKCEKISTLSCENKIISFKEMNPPDNIKDTKSDIIFFQRSVPGHDNKMQFESSSYEGYFLACEKERDLFKLILKKEDELGDRSIMFTVQNED

SEQ ID NO: 2193 - protein, 133 aa, Homo sapiens [sequence omitted]

SEQ ID NO: 2194 - protein, 138 aa, Homo sapiens
QDPYVKEAENLKKYFNAGHSDVADNGTLFLGILKNWKEESDRKIMQSQIVSFYFKLFKNFKDDQSIQKSVETIKEDMNVKFFNSNKKKRDDFEKLTNYSVTDLNVQRKAIHELIQVMAELSPAAKTGKRKRSQMLFRG

SEQ ID NO: 2195-2269 - skipped (75 entries)

SEQ ID NO: 2270 - protein, 133 aa, Unknown
  Description of Unknown: IL-2 cytokine sequence
APTSSSTKKTQLQLEHLLLDLQMILNGINNYKNPKLTRMLTFKFYMPKKATELKHLQCLEEELKPLEEVLNLAQSKNFHLRPRDLISNINVIVLELKGSETTFMCEYADETATIVEFLNRWITFAQSIISTLT

SEQ ID NO: 2271-2279 - skipped (9 entries)

SEQ ID NO: 2280 - protein, 133 aa, Unknown
  Description of Unknown: IL-2 cytokine sequence
APASSSTKKTQLQLEHLLLDLQMILNGINNYKNPKLTRMLTAKFAMPKKATELKHLQCLEEELKPLEEVLNGAQSKNFHLRPRDLISNINVIVLELKGSETTFMCEYADETATIVEFLNRWITFAQSIISTLT

SEQ ID NO: 2281-2289 - skipped (9 entries)

SEQ ID NO: 2290 - protein, 518 aa, Artificial Sequence
  Description of Artificial Sequence: Synthetic polypeptide
IWELKKDVYVVELDWYPDAPGEMVVLTCDTPEEDGITWTLDQSSEVLGSGKTLTIQVKEFGDAGQYTCHKGGEVLSHSLLLLHKKEDGIWSTDILKDQKEPKNKTFLRCEAKNYSGRFTCWWLTTISTDLTFSVKSSRGSSDPQGVTCGAATLSAERVRGDNKEYEYSVECQEDSACPAAEESLPIEVMVDAVHKLKYENYTSSFFIRDIIKPDPPKNLQLKPLKNSRQVEVSWEYPDTWSTPHSYFSLTFCVQVQGKSKREKKDRVFTDKTSATVICRKNASISVRAQDRYYSSSWSEWASVPCSGGGGSGGGGSGGGGSRNLPVATPDPGMFPCLHHSQNLLRAVSNMLQKARQTLEFYPCTSEEIDHEDITKDKTSTVEACLPLELTKNESCLNSRETSFITNGSCLASRKTSFMMALCLSSIYEDLKMYQVEFKTMNAKLLMDPKRQIFLDQNMLAVIDELMQALNFNSETVPQKSSLEEPDFYKTKIKLCILLHAFRIRAVTIDRVMSYLNAS

SEQ ID NO: 2291-2299 - skipped (9 entries)

SEQ ID NO: 2300 - protein, 340 aa, Artificial Sequence
  Description of Artificial Sequence: Synthetic polypeptide
SPGQGTQSENSCTHFPGNLPNMLRDLRDAFSRVKTFFQMKDQLDNLLLKESLLEDFKGYLGCQALSEMIQFYLEEVMPQAENQDPDIKAHVNSLGENLKTLRLRLRRCHRFLPCENKSKAVEQVKNAFNKLQEKGIYKAMSEFDIFINYIEAYMTMKIRNGGGGSGGGGSGGGGSGGGGSSPGQGTQSENSCTHFPGNLPNMLRDLRDAFSRVKTFFQMKDQLDNLLLKESLLEDFKGYLGCQALSEMIQFYLEEVMPQAENQDPDIKAHVNSLGENLKTLRLRLRRCHRFLPCENKSKAVEQVKNAFNKLQEKGIYKAMSEFDIFINYIEAYMTMKIRN

SEQ ID NO: 2301-2309 - skipped (9 entries)

SEQ ID NO: 2310 - protein, 166 aa, Unknown
  Description of Unknown: IL-10 cytokine sequence
SPGQGTQSENSCTHFPGNLPNMLRDLRDAFSRVKTFFQMKDQLDNLLLKESLLEDFKGYLGCQALSEMIQFYLEEVMPQAENQDPDIKAHVNSLGENLKTLRLRLRRCHRFLPCENGGGSGGKSKAVEQVKNAFNKLQEKGIYKAMSEFDIFINYIEAYMTMKIRN

SEQ ID NO: 2311-2319 - skipped (9 entries)

SEQ ID NO: 2320 - protein, 114 aa, Unknown
  Description of Unknown: IL-15 cytokine sequence
NWVNVISDLKKIEDLIQSMHIDATLYTESDVHPSCKVTAMKCFLLELQVISLASGDASIHDTVENLIILANNSLSSNGAVTESGCKECEELEEKNIKEFLQSFVHIVQMFINTS

SEQ ID NO: 2321-2999 - skipped (679 entries)

SEQ ID NO: 3000 - protein, 107 aa, Artificial Sequence
  Description of Artificial Sequence: Synthetic polypeptide
DIQMTQSPSFLSASVGDRVTITCSASQGISNYLNWYQQKPGKAVKLLIYYTSSLHSGVPSRFSGSGSGTEYTLTISSLQPEDFATYYCQQYSKLPRTFGGGTKVEIK

SEQ ID NO: 3001 - protein, 107 aa, Artificial Sequence
  Description of Artificial Sequence: Synthetic polypeptide
DIQMTQSPSSLSASVGDRVTITCSASQGISNYLNWYQQKPGKAVKLLIYYTSSLHSGVPSRFSGSGSGTDYTLTISSLQPEDFATYYCQQYSKLPRTFGGGTKVEIK

SEQ ID NO: 3002 - protein, 107 aa, Artificial Sequence
  Description of Artificial Sequence: Synthetic polypeptide
DIQMTQSPSSLSASVGDRVTITCSASQGISNYLNWYQQKPGKVVKLLIYYTSSLHSGVPSRFSGSGSGTDYTLTISSLQPEDVATYYCQQYSKLPRTFGGGTKVEIK

SEQ ID NO: 3003 - protein, 107 aa, Artificial Sequence
  Description of Artificial Sequence: Synthetic polypeptide
DIQMTQSPSSLSASVGDRVTITCSASQGISNYLNWYQQKPGQAVKLLIYYTSSLHSGVPSRFSGSGSGTDYTLTISSLQPEDVATYYCQQYSKLPRTFGGGTKVEIK

SEQ ID NO: 3004 - protein, 107 aa, Artificial Sequence
  Description of Artificial Sequence: Synthetic polypeptide
DIQMTQSPSSLSASVGDRVTITCSASQGISNYLNWYQQKPGKAVKLLIYYTSSLHSGVPSRFSGSGSGTDYTFTISSLQPEDIATYYCQQYSKLPRTFGGGTKVEIK

SEQ ID NO: 3005 - protein, 107 aa, Artificial Sequence
  Description of Artificial Sequence: Synthetic polypeptide
DIQMTQSPSSLSASVGDRVTITCSASQGISNYLNWYQQKPGKTVKLLIYYTSSLHSGIPSRFSGSGSGTDYTLTIRSLQPEDFATYYCQQYSKLPRTFGGGTKVEIK

SEQ ID NO: 3006 - protein, 107 aa, Artificial Sequence
  Description of Artificial Sequence: Synthetic polypeptide
AIQMTQSPSSLSASVGDRVTITCSASQGISNYLNWYQQKPGKAVKLLIYYTSSLHSGVPSRFSGSGSGTDYTLTISSLQPEDFATYYCQQYSKLPRTFGGGTKVEIK

SEQ ID NO: 3007 - protein, 107 aa, Artificial Sequence
  Description of Artificial Sequence: Synthetic polypeptide
DIQMTQSPSSVSASVGDRVTITCSASQGISNYLNWYQQKPGKAVKLLIYYTSSLHSGVPSRFSGSGSGTDYTLTISSLQPEDFATYYCQQYSKLPRTFGGGTKVEIK

SEQ ID NO: 3008 - protein, 107 aa, Artificial Sequence
  Description of Artificial Sequence: Synthetic polypeptide
DIQMTQSPSSLSASVGDRVTITCSASQGISNYLNWYQQKPGKAVKRLIYYTSSLHSGVPSRFSGSGSGTEYTLTISNLQPEDFATYYCQQYSKLPRTFGGGTKVEIK

SEQ ID NO: 3009 - protein, 107 aa, Artificial Sequence
  Description of Artificial Sequence: Synthetic polypeptide
AIRMTQSPFSLSASVGDRVTITCSASQGISNYLNWYQQKPAKAVKLFIYYTSSLHSGVPSRFSGSGSGTDYTLTISSLQPEDFATYYCQQYSKLPRTFGGGTKVEIK

SEQ ID NO: 3010 - protein, 107 aa, Artificial Sequence
  Description of Artificial Sequence: Synthetic polypeptide
DIQMTQSPSSLSASVGDRVTITCSASQGISNYLNWYQQKPGKAVKRLIYYTSSLHSGVPSRFSGSGSGTEYTLTISSLQPEDFATYYCQQYSKLPRTFGGGTKVEIK

SEQ ID NO: 3011 - protein, 107 aa, Artificial Sequence
  Description of Artificial Sequence: Synthetic polypeptide
DIQMTQSPSTLSASVGDRVTITCSASQGISNYLNWYQQKPGKAVKLLIYYTSSLHSGVPSRFSGSGSGTEYTLTISSLQPDDFATYYCQQYSKLPRTFGGGTKVEIK

SEQ ID NO: 3012 - protein, 107 aa, Artificial Sequence
  Description of Artificial Sequence: Synthetic polypeptide
DIQMTQSPSSLSASVGDRVTITCSASQGISNYLNWYQQKPGKAVKSLIYYTSSLHSGVPSRFSGSGSGTDYTLTISSLQPEDFATYYCQQYSKLPRTFGGGTKVEIK

SEQ ID NO: 3013 - protein, 107 aa, Artificial Sequence
  Description of Artificial Sequence: Synthetic polypeptide
DIQMTQSPSSLSASVGDRVTITCSASQGISNYLNWYQQKPGKAVKSLIYYTSSLHSGVPSKFSGSGSGTDYTLTISSLQPEDFATYYCQQYSKLPRTFGGGTKVEIK

SEQ ID NO: 3014 - protein, 107 aa, Artificial Sequence
  Description of Artificial Sequence: Synthetic polypeptide
DIQMTQSPSSLSASVGDRVTITCSASQGISNYLNWYQQKPEKAVKSLIYYTSSLHSGVPSRFSGSGSGTDYTLTISSLQPEDFATYYCQQYSKLPRTFGGGTKVEIK

SEQ ID NO: 3015 - protein, 107 aa, Artificial Sequence
  Description of Artificial Sequence: Synthetic polypeptide
DIQMTQSPSAMSASVGDRVTITCSASQGISNYLNWYQQKPGKVVKRLIYYTSSLHSGVPSRFSGSGSGTEYTLTISSLQPEDFATYYCQQYSKLPRTFGGGTKVEIK

SEQ ID NO: 3016 - protein, 107 aa, Artificial Sequence
  Description of Artificial Sequence: Synthetic polypeptide
DIVMTQSPDSLAVSLGERATINCSASQGISNYLNWYQQKPGQPVKLLIYYTSSLHSGVPDRFSGSGSGTDYTLTISSLQAEDVAVYYCQQYSKLPRTFGGGTKVEIK

SEQ ID NO: 3017 - protein, 107 aa, Artificial Sequence
  Description of Artificial Sequence: Synthetic polypeptide
EIVMTQSPGTLSLSPGERATLSCSASQGISNYLNWYQQKPGQAVKLLIYYTSSLHSGIPDRFSGSGSGTDYTLTISRLEPEDFAVYYCQQYSKLPRTFGGGTKVEIK

SEQ ID NO: 3018 - protein, 107 aa, Artificial Sequence
  Description of Artificial Sequence: Synthetic polypeptide
EIVMTQSPPTLSLSPGERVTLSCSASQGISNYLNWYQQKPGQAVKLLIYYTSSLHSGIPARFSGSGSGTDYTLTISSLQPEDFAVYYCQQYSKLPRTFGGGTKVEIK

SEQ ID NO: 3019 - protein, 107 aa, Artificial Sequence
  Description of Artificial Sequence: Synthetic polypeptide
EIVMTQSPPTLSLSPGERVTLSCSASQGISNYLNWYQQKPGQAVKLLIYYTSSLHSSIPARFSGSGSGTDYTLTISSLQPEDFAVYYCQQYSKLPRTFGGGTKVEIK

SEQ ID NO: 3020 - protein, 107 aa, Artificial Sequence
  Description of Artificial Sequence: Synthetic polypeptide
EIVMTQSPATLSLSPGERATLSCSASQGISNYLNWYQQKPGQAVKLLIYYTSSLHSGIPARFSGSGSGTDYTLTISSLEPEDFAVYYCQQYSKLPRTFGGGTKVEIK

SEQ ID NO: 3021 - protein, 107 aa, Artificial Sequence
  Description of Artificial Sequence: Synthetic polypeptide
EIVMTQSPATLSLSPGERATLSCSASQGISNYLNWYQQKPGQAVKLLIYYTSSLHSGIPARFSGSGSGTDYTLTISRLEPEDFAVYYCQQYSKLPRTFGGGTKVEIK

SEQ ID NO: 3022 - protein, 107 aa, Artificial Sequence
  Description of Artificial Sequence: Synthetic polypeptide
EIVMTQSPATLSLSPGERATLSCSASQGISNYLNWYQQKPGQAVKLLIYYTSSLHSGIPDRFSGSGSGTDYTLTISRLEPEDFAVYYCQQYSKLPRTFGGGTKVEIK

SEQ ID NO: 3023 - protein, 107 aa, Artificial Sequence
  Description of Artificial Sequence: Synthetic polypeptide
EIVMTQSPATLSLSPGERATLSCSASQGISNYLNWYQQKPGLAVKLLIYYTSSLHSGIPDRFSGSGSGTDYTLTISRLEPEDFAVYYCQQYSKLPRTFGGGTKVEIK

SEQ ID NO: 3024 - protein, 107 aa, Artificial Sequence
  Description of Artificial Sequence: Synthetic polypeptide
DIQMIQSPSFLSASVGDRVSIICSASQGISNYLNWYLQKPGKSVKLFIYYTSSLHSGVSSRFSGRGSGTDYTLTIISLKPEDFAAYYCQQYSKLPRTFGGGTKVEIK

SEQ ID NO: 3025 - protein, 107 aa, Artificial Sequence
  Description of Artificial Sequence: Synthetic polypeptide
EIVMTQSPATLSLSPGERATLSCSASQGISNYLNWYQQKPGQAVKLLIYYTSSLHSGIPARFSGSGSGTDYTLTISSLQPEDFAVYYCQQYSKLPRTFGGGTKVEIK

SEQ ID NO: 3026 - protein, 107 aa, Artificial Sequence
  Description of Artificial Sequence: Synthetic polypeptide
EIVMTQSPATLSLSPGERATLSCSASQGISNYLNWYQQKPGQAVKLLIYYTSSLHSGIPARFSGSGPGTDYTLTISSLEPEDFAVYYCQQYSKLPRTFGGGTKVEIK

SEQ ID NO: 3027 - protein, 107 aa, Artificial Sequence
  Description of Artificial Sequence: Synthetic polypeptide
DIVMTQTPLSLSVTPGQPASISCSASQGISNYLNWYLQKPGQSVKLLIYYTSSLHSGVPDRFSGSGSGTDYTLKISRVEAEDVGVYYCQQYSKLPRTFGGGTKVEIK

SEQ ID NO: 3028 - protein, 107 aa, Artificial Sequence
  Description of Artificial Sequence: Synthetic polypeptide
DIVMTQTPLSLSVTPGQPASISCSASQGISNYLNWYLQKPGQPVKLLIYYTSSLHSGVPDRFSGSGSGTDYTLKISRVEAEDVGVYYCQQYSKLPRTFGGGTKVEIK

SEQ ID NO: 3029 - protein, 107 aa, Artificial Sequence
  Description of Artificial Sequence: Synthetic polypeptide
DIVMTQSPAFLSVTPGEKVTITCSASQGISNYLNWYQQKPDQAVKLLIYYTSSLHSGVPSRFSGSGSGTDYTFTISSLEAEDAATYYCQQYSKLPRTFGGGTKVEIK

SEQ ID NO: 3030 - protein, 107 aa, Artificial Sequence
  Description of Artificial Sequence: Synthetic polypeptide
DIVMTQSPLSLPVTPGEPASISCSASQGISNYLNWYLQKPGQSVKLLIYYTSSLHSGVPDRFSGSGSGTDYTLKISRVEAEDVGVYYCQQYSKLPRTFGGGTKVEIK

SEQ ID NO: 3031 - protein, 107 aa, Artificial Sequence
  Description of Artificial Sequence: Synthetic polypeptide
DIVMTQTPLSLPVTPGEPASISCSASQGISNYLNWYLQKPGQSVKLLIYYTSSLHSGVPDRFSGSGSGTDYTLKISRVEAEDVGVYYCQQYSKLPRTFGGGTKVEIK

SEQ ID NO: 3032 - protein, 107 aa, Artificial Sequence
  Description of Artificial Sequence: Synthetic polypeptide
EIVMTQSPATLSVSPGERATLSCSASQGISNYLNWYQQKPGQAVKLLIYYTSSLHSGIPARFSGSGSGTEYTLTISILQSEDFAVYYCQQYSKLPRTFGGGTKVEIK

SEQ ID NO: 3033 - protein, 107 aa, Artificial Sequence
  Description of Artificial Sequence: Synthetic polypeptide
EIVMTQSPATLSVSPGERATLSCSASQGISNYLNWYQQKPGQAVKLLIYYTSSLHSGIPARFSGSGSGTEYTLTISSLQSEDFAVYYCQQYSKLPRTFGGGTKVEIK

SEQ ID NO: 3034 - protein, 107 aa, Artificial Sequence
  Description of Artificial Sequence: Synthetic polypeptide
DIVMTQSPLSLPVTLGQPASISCSASQGISNYLNWYQQRPGQSVKRLIYYTSSLHSGVPDRFSGSGSGTDYTLKISRVEAEDVGVYYCQQYSKLPRTFGGGTKVEIK

SEQ ID NO: 3035 - protein, 107 aa, Artificial Sequence
  Description of Artificial Sequence: Synthetic polypeptide
EITMTQSPAFMSATPGDKVNISCSASQGISNYLNWYQQKPGEAVKFIIYYTSSLHSGIPPRFSGSGYGTDYTLTINNIESEDAAYYYCQQYSKLPRTFGGGTKVEIK

SEQ ID NO: 3036 - protein, 107 aa, Artificial Sequence
  Description of Artificial Sequence: Synthetic polypeptide
DIVMTQTPLSSPVTLGQPASISCSASQGISNYLNWYQQRPGQPVKLLIYYTSSLHSGVPDRFSGSGAGTDYTLKISRVEAEDVGVYYCQQYSKLPRTFGGGTKVEIK

SEQ ID NO: 3037 - protein, 107 aa, Artificial Sequence
  Description of Artificial Sequence: Synthetic polypeptide
EIVMTQSPDFQSVTPKEKVTITCSASQGISNYLNWYQQKPDQSVKLLIYYTSSLHSGVPSRFSGSGSGTDYTLTINSLEAEDAATYYCQQYSKLPRTFGGGTKVEIK

SEQ ID NO: 3038 - protein, 107 aa, Artificial Sequence
  Description of Artificial Sequence: Synthetic polypeptide
EIVMTQTPLSLSITPGEQASISCSASQGISNYLNWYLQKARPVVKLLIYYTSSLHSGVPDRFSGSGSGTDYTLKISRVEAEDFGVYYCQQYSKLPRTFGGGTKVEIK

SEQ ID NO: 3039 - protein, 107 aa, Artificial Sequence
  Description of Artificial Sequence: Synthetic polypeptide
EIVMTQTPLSLSITPGEQASMSCSASQGISNYLNWYLQKARPVVKLLIYYTSSLHSGVPDRFSGSGSGTDYTLKISRVEAEDFGVYYCQQYSKLPRTFGGGTKVEIK

SEQ ID NO: 3040 - protein, 120 aa, Artificial Sequence
  Description of Artificial Sequence: Synthetic polypeptide
QVTLKESGPVLVKPTETLTLTCTVSGFSLTAYGVNWVRQPPGKALEWLGMIWGDGNTDYNSALKSRLTISKDNSKSQVVLTMTNMDPVDTATYYCARDRVTATLYAMDYWGQGTLVTVSS

SEQ ID NO: 3041 - protein, 120 aa, Artificial Sequence
  Description of Artificial Sequence: Synthetic polypeptide
QVTLKESGPALVKPTETLTLTCTVSGFSLTAYGVNWVRQPPGKALEWLGMIWGDGNTDYNSALKSRLIISKDNSKSQVVLTMTNMDPVDTATYYCARDRVTATLYAMDYWGQGTLVTVSS

SEQ ID NO: 3042 - protein, 120 aa, Artificial Sequence
  Description of Artificial Sequence: Synthetic polypeptide
QVTLKESGPALVKPTQTLTLTCTVSGFSLTAYGVNWVRQPPGKALEWLGMIWGDGNTDYNSALKSRLTISKDNSKSQVVLTMTNMDPVDTATYYCARDRVTATLYAMDYWGQGTLVTVSS

SEQ ID NO: 3043 - protein, 120 aa, Artificial Sequence
  Description of Artificial Sequence: Synthetic polypeptide
QVQLQESGPGLVKPSGTLSLTCAVSGFSLTAYGVNWVRQPPGKGLEWLGMIWGDGNTDYNSALKSRLTISKDNSKSQVSLKLSSVTAADTAVYYCARDRVTATLYAMDYWGQGTLVTVSS

SEQ ID NO: 3044 - protein, 120 aa, Artificial Sequence
  Description of Artificial Sequence: Synthetic polypeptide
QVTLKESGPTLVKPTQTLTLTCTVSGFSLTAYGVNWVRQPPGKALEWLGMIWGDGNTDYNSALKSRLTITKDNSKSQVVLTMTNMDPVDTATYYCARDRVTATLYAMDYWGQGTLVTVSS

SEQ ID NO: 3045 - protein, 120 aa, Artificial Sequence
  Description of Artificial Sequence: Synthetic polypeptide
QVTLKESGPALVKPTQTLTLTCTVSGFSLTAYGVNWVRQPPGKALEWLGMIWGDGNTDYNSALKSRLTITKDNSKSQVVLTMTNMDPVDTATYYCARDRVTATLYAMDYWGQGTLVTVSS

SEQ ID NO: 3046 - protein, 120 aa, Artificial Sequence
  Description of Artificial Sequence: Synthetic polypeptide
QVQLQESGPGLVKPSQTLSLTCTVSGFSLTAYGVNWVRQPPGKGLEWLGMIWGDGNTDYNSALKSRLTISKDNSKSQVSLKLSSVTAADTAVYYCARDRVTATLYAMDYWGQGTLVTVSS

SEQ ID NO: 3047 - protein, 120 aa, Artificial Sequence
  Description of Artificial Sequence: Synthetic polypeptide
QVQLQESGPGLVKPSETLSLTCTVSGFSLTAYGVNWVRQPPGKGLEWLGMIWGDGNTDYNSALKSRLTISKDNSKSQVSLKLSSVTAADTAVYYCARDRVTATLYAMDYWGQGTLVTVSS

SEQ ID NO: 3048 - protein, 120 aa, Artificial Sequence
  Description of Artificial Sequence: Synthetic polypeptide
QVQLQESGPGLVKPSQTLSLTCAVSGFSLTAYGVNWVRQPPGKGLEWLGMIWGDGNTDYNSALKSRLTISKDNSKSQVSLKLSSVTAADTAVYYCARDRVTATLYAMDYWGQGTLVTVSS

SEQ ID NO: 3049 - protein, 120 aa, Artificial Sequence
  Description of Artificial Sequence: Synthetic polypeptide
QVQLQESGPGLVKPSDTLSLTCTVSGFSLTAYGVNWVRQPPGKGLEWLGMIWGDGNTDYNSALKSRLTISKDNSKSQVSLKLSSVTAADTAVYYCARDRVTATLYAMDYWGQGTLVTVSS

SEQ ID NO: 3050 - protein, 120 aa, Artificial Sequence
  Description of Artificial Sequence: Synthetic polypeptide
QVQLQESGPGLVKPSQTLSLTCTVSGFSLTAYGVNWVRQHPGKGLEWLGMIWGDGNTDYNSALKSRLTISKDNSKSQVSLKLSSVTAADTAVYYCARDRVTATLYAMDYWGQGTLVTVSS

SEQ ID NO: 3051 - protein, 120 aa, Artificial Sequence
  Description of Artificial Sequence: Synthetic polypeptide
QVQLQESGPGLVKPSQTLSLTCTVSGFSLTAYGVNWVRQPAGKGLEWLGMIWGDGNTDYNSALKSRLTISKDNSKSQVSLKLSSVTAADTAVYYCARDRVTATLYAMDYWGQGTLVTVSS

SEQ ID NO: 3052 - protein, 120 aa, Artificial Sequence
  Description of Artificial Sequence: Synthetic polypeptide
QVQLQESGPGLVKPSQTLSLTCAVSGFSLTAYGVNWVRQPPGKGLEWLGMIWGDGNTDYNSALKSRLTISKDNSKSQVSLKLSSVTAVDTAVYYCARDRVTATLYAMDYWGQGTLVTVSS

SEQ ID NO: 3053 - protein, 120 aa, Artificial Sequence
  Description of Artificial Sequence: Synthetic polypeptide
QVQLQESGPGLVKPSETLSLTCTVSGFSLTAYGVNWVRQPPGKGLEWLGMIWGDGNTDYNSALKSRLTISKDNSKSHVSLKLSSVTAADTAVYYCARDRVTATLYAMDYWGQGTLVTVSS

SEQ ID NO: 3054 - protein, 120 aa, Artificial Sequence
  Description of Artificial Sequence: Synthetic polypeptide
QVQLQESGPGLVKPSETLSLTCAVSGFSLTAYGVNWVRQPPGKGLEWLGMIWGDGNTDYNSALKSRLTISKDNSKSQVSLKLSSVTAADTAVYYCARDRVTATLYAMDYWGQGTLVTVSS

SEQ ID NO: 3055 - protein, 120 aa, Artificial Sequence
  Description of Artificial Sequence: Synthetic polypeptide
QVQLQESGPGLVKPSQTLSLTCAVYGFSLTAYGVNWVRQPPGKGLEWLGMIWGDGNTDYNSALKSRLTISKDNSKSQVSLKLSSVTAADTAVYYCARDRVTATLYAMDYWGQGTLVTVSS

SEQ ID NO: 3056 - protein, 120 aa, Artificial Sequence
  Description of Artificial Sequence: Synthetic polypeptide
RVQLQESGPGLVKPSETLSLTCTVSGFSLTAYGVNWVRQPPGKGLEWLGMIWGDGNTDYNSALKSRLTISKDNSKSQVPLKLSSVTAADTAVYYCARDRVTATLYAMDYWGQGTLVTVSS

SEQ ID NO: 3057 - protein, 120 aa, Artificial Sequence
  Description of Artificial Sequence: Synthetic polypeptide
QVQLQESGPGLVKPSQTLSLTCTVSGFSLTAYGVNWVRQHPGKGLEWLGMIWGDGNTDYNSALKSLLTISKDNSKSQVSLKLSSVTAADTAVYYCARDRVTATLYAMDYWGQGTLVTVSS

SEQ ID NO: 3058 - protein, 120 aa, Artificial Sequence
  Description of Artificial Sequence: Synthetic polypeptide
QVQLQESGPGLVKPSDTLSLTCAVSGFSLTAYGVNWVRQPPGKGLEWLGMIWGDGNTDYNSALKSRLTISKDNSKSQVSLKLSSVTALDTAVYYCARDRVTATLYAMDYWGQGTLVTVSS

SEQ ID NO: 3059 - protein, 120 aa, Artificial Sequence
  Description of Artificial Sequence: Synthetic polypeptide
QVQLQESGPGLVKPSDTLSLTCAVSGFSLTAYGVNWVRQPPGKGLEWLGMIWGDGNTDYNSALKSRLTISKDNSKSQVSLKLSSVTAVDTAVYYCARDRVTATLYAMDYWGQGTLVTVSS

SEQ ID NO: 3060 - protein, 120 aa, Artificial Sequence
  Description of Artificial Sequence: Synthetic polypeptide
QVQLQESGSGLVKPSQTLSLTCAVSGFSLTAYGVNWVRQPPGKGLEWLGMIWGDGNTDYNSALKSRLTISKDNSKSQVSLKLSSVTAADTAVYYCARDRVTATLYAMDYWGQGTLVTVSS

SEQ ID NO: 3061 - protein, 120 aa, Artificial Sequence
  Description of Artificial Sequence: Synthetic polypeptide
EVQLVESGGGLVQPGRSLRLSCTVSGFSLTAYGVNWVRQAPGKGLEWLGMIWGDGNTDYNSALKSRLTISKDNSKSIVYLQMNSLKTEDTAVYYCARDRVTATLYAMDYWGQGTLVTVSS

SEQ ID NO: 3062 - protein, 120 aa, Artificial Sequence
  Description of Artificial Sequence: Synthetic polypeptide
EVQLVESGGGLVQPGPSLRLSCTVSGFSLTAYGVNWVRQAPGKGLEWLGMIWGDGNTDYNSALKSRLTISKDNSKSIVYLQMNSLKTEDTAVYYCARDRVTATLYAMDYWGQGTLVTVSS

SEQ ID NO: 3063 - protein, 120 aa, Artificial Sequence
  Description of Artificial Sequence: Synthetic polypeptide
QVQLQESGSGLVKPSQTLSLTCAVSGFSLTAYGVNWVRQSPGKGLEWLGMIWGDGNTDYNSALKSRLTISKDNSKSQVSLKLSSVTAADTAVYYCARDRVTATLYAMDYWGQGTLVTVSS

SEQ ID NO: 3064 - protein, 120 aa, Artificial Sequence
  Description of Artificial Sequence: Synthetic polypeptide
QVQLQESGPGLVKPSETLSLTCTVSGFSLTAYGVNWVRQPAGKGLEWLGMIWGDGNTDYNSALKSRLTISKDNSKSQVSLKLSSVTAADTAVYYCARDRVTATLYAMDYWGQGTLVTVSS

SEQ ID NO: 3065 - protein, 120 aa, Artificial Sequence
  Description of Artificial Sequence: Synthetic polypeptide
EVQLVESGGGLVKPGRSLRLSCTVSGFSLTAYGVNWVRQAPGKGLEWLGMIWGDGNTDYNSALKSRLTISKDNSKSIVYLQMNSLKTEDTAVYYCARDRVTATLYAMDYWGQGTLVTVSS

SEQ ID NO: 3066 - protein, 120 aa, Artificial Sequence
  Description of Artificial Sequence: Synthetic polypeptide
QVQLQESGPGLVKPSETLSLTCAVYGFSLTAYGVNWVRQPPGKGLEWLGMIWGDGNTDYNSALKSRLTISKDNSKSQVYLKLSSVTAADTAVYYCARDRVTATLYAMDYWGQGTLVTVSS

SEQ ID NO: 3067 - protein, 120 aa, Artificial Sequence
  Description of Artificial Sequence: Synthetic polypeptide
QVQLQESGPGLVKPSDTLSLTCAVSGFSLTAYGVNWVRQPPGKGLEWLGMIWGDGNTDYNSALKSRLTISKDNSKSQVSLKLSSVTAVDTGVYYCARDRVTATLYAMDYWGQGTLVTVSS

SEQ ID NO: 3068 - protein, 120 aa, Artificial Sequence
  Description of Artificial Sequence: Synthetic polypeptide
EVQLVESGGGLVQPGGSLRLSCAVSGFSLTAYGVNWVRQAPGKGLEWLGMIWGDGNTDYNSALKSRLTISKDNSKSSVYLQMNSLKTEDTAVYYCARDRVTATLYAMDYWGQGTLVTVSS

SEQ ID NO: 3069 - protein, 120 aa, Artificial Sequence
  Description of Artificial Sequence: Synthetic polypeptide
EVQLVESGGGLVKPGGSLRLSCAVSGFSLTAYGVNWVRQAPGKGLEWLGMIWGDGNTDYNSALKSRLTISKDNSKSTVYLQMNSLKTEDTAVYYCARDRVTATLYAMDYWGQGTLVTVSS

SEQ ID NO: 3070 - protein, 120 aa, Artificial Sequence
  Description of Artificial Sequence: Synthetic polypeptide
QVQLQQSGPGLVKPSQTLSLTCAVSGFSLTAYGVNWVRQSPSRGLEWLGMIWGDGNTDYNSALKSRLTINKDNSKSQVSLQLNSVTPEDTAVYYCARDRVTATLYAMDYWGQGTLVTVSS

SEQ ID NO: 3071 - protein, 120 aa, Artificial Sequence
  Description of Artificial Sequence: Synthetic polypeptide
QVQLVESGGGLVQPGGSLRLSCSVSGFSLTAYGVNWVRQAPGKGLEWLGMIWGDGNTDYNSALKSRLTISKDNSKSTVYLQMNSLRAEDTAVYYCARDRVTATLYAMDYWGQGTLVTVSS

SEQ ID NO: 3072 - protein, 120 aa, Artificial Sequence
  Description of Artificial Sequence: Synthetic polypeptide
QVQLQQWGAGLLKPSETLSLTCAVYGFSLTAYGVNWVRQPPGKGLEWLGMIWGDGNTDYNSALKSRLTISKDNSKSQVSLKLSSVTAADTAVYYCARDRVTATLYAMDYWGQGTLVTVSS

SEQ ID NO: 3073 - protein, 120 aa, Artificial Sequence
  Description of Artificial Sequence: Synthetic polypeptide
QVQLVESGGGVVQPGRSLRLSCAVSGFSLTAYGVNWVRQAPGKGLEWLGMIWGDGNTDYNSALKSRLTISKDNSTSTVFLQMNSLRAEDTAVYYCARDRVTATLYAMDYWGQGTLVTVSS

SEQ ID NO: 3074 - protein, 120 aa, Artificial Sequence
  Description of Artificial Sequence: Synthetic polypeptide
EVQLVESGGGLVQPGGSLRLSCAVSGFSLTAYGVNWVRQAPGKGLEWLGMIWGDGNTDYNSALKSRLTISKDNSKSTVYLQMNSLRAEDTAVYYCARDRVTATLYAMDYWGQGTLVTVSS

SEQ ID NO: 3075 - protein, 120 aa, Artificial Sequence
  Description of Artificial Sequence: Synthetic polypeptide
EVQLVESGGGLVQPGGSLRLSCAVSGFSLTAYGVNWVRQAPGKGLEWLGMIWGDGNTDYNSALKSRLTISKDNAKSSVYLQMNSLRDEDTAVYYCARDRVTATLYAMDYWGQGTLVTVSS

SEQ ID NO: 3076 - protein, 120 aa, Artificial Sequence
  Description of Artificial Sequence: Synthetic polypeptide
EVQLLESGGGLVQPGGSLRLSCAVSGFSLTAYGVNWVRQAPGKGLEWLGMIWGDGNTDYNSALKSRLTISKDNSKSTVYLQMNSLRAEDTAVYYCARDRVTATLYAMDYWGQGTLVTVSS

SEQ ID NO: 3077 - protein, 120 aa, Artificial Sequence
  Description of Artificial Sequence: Synthetic polypeptide
QVQLVESGGGLVKPGGSLRLSCAVSGFSLTAYGVNWVRQAPGKGLEWLGMIWGDGNTDYNSALKSRLTISKDNAKSSVYLQMNSLRAEDTAVYYCARDRVTATLYAMDYWGQGTLVTVSS

SEQ ID NO: 3078 - protein, 120 aa, Artificial Sequence
  Description of Artificial Sequence: Synthetic polypeptide
EVQLVESGGGLVQPGGSLKLSCAVSGFSLTAYGVNWVRQASGKGLEWLGMIWGDGNTDYNSALKSRLTISKDNSKSTVYLQMNSLKTEDTAVYYCARDRVTATLYAMDYWGQGTLVTVSS

SEQ ID NO: 3079 - protein, 120 aa, Artificial Sequence
  Description of Artificial Sequence: Synthetic polypeptide
QVQLLESGGGLVKPGGSLRLSCAVSGFSLTAYGVNWVRQAPGKGLEWLGMIWGDGNTDYNSALKSRLTISKDNAKSSVYLQMNSLRAEDTAVYYCARDRVTATLYAMDYWGQGTLVTVSS

SEQ ID NO: 3080 - protein, 120 aa, Artificial Sequence
  Description of Artificial Sequence: Synthetic polypeptide
QVQLVESGGGVVQPGRSLRLSCAVSGFSLTAYGVNWVRQAPGKGLEWLGMIWGDGNTDYNSALKSRLTISKDNSKSTVYLQMNSLRAEDTAVYYCARDRVTATLYAMDYWGQGTLVTVSS

SEQ ID NO: 3081 - protein, 120 aa, Artificial Sequence
  Description of Artificial Sequence: Synthetic polypeptide
QVQLVESGGGVVQPGRSLRLSCAVSGFSLTAYGVNWVRQAPGKGLEWLGMIWGDGNTDYNSALKSRLTISKDNSKSRVYLQMNSLRAEDTAVYYCARDRVTATLYAMDYWGQGTLVTVSS

SEQ ID NO: 3082 - protein, 120 aa, Artificial Sequence
  Description of Artificial Sequence: Synthetic polypeptide
QVQLVESGGGVVQPGRSLRLSCAVSGFSLTAYGVNWVRQAPGKGLEWLGMIWGDGNTDYNSALKSRLAISKDNSKSTVYLQMNSLRAEDTAVYYCARDRVTATLYAMDYWGQGTLVTVSS

SEQ ID NO: 3083 - protein, 120 aa, Artificial Sequence
  Description of Artificial Sequence: Synthetic polypeptide
QVQLVESGGGVVQPGGSLRLSCAVSGFSLTAYGVNWVRQAPGKGLEWLGMIWGDGNTDYNSALKSRLTISKDNSKSTVYLQMNSLRAEDTAVYYCARDRVTATLYAMDYWGQGTLVTVSS

SEQ ID NO: 3084 - protein, 120 aa, Artificial Sequence
  Description of Artificial Sequence: Synthetic polypeptide
EVQLVESGGGLVQPGGSLRLSCAVSGFSLTAYGVNWVRQAPGKGLEWLGMIWGDGNTDYNSALKSRLTISKDNAKSTVYLQMNSLRAEDTAVYYCARDRVTATLYAMDYWGQGTLVTVSS

SEQ ID NO: 3085 - protein, 120 aa, Artificial Sequence
  Description of Artificial Sequence: Synthetic polypeptide
EVQLVESGGGLVQPGGSLRLSCAVSGFSLTAYGVNWVRQAPGKGLEWLGMIWGDGNTDYNSALKSRLTISKDNAKSSVYLQMNSLRAEDTAVYYCARDRVTATLYAMDYWGQGTLVTVSS

SEQ ID NO: 3086 - protein, 120 aa, Artificial Sequence
  Description of Artificial Sequence: Synthetic polypeptide
EVQLVESGGVVVQPGGSLRLSCAVSGFSLTAYGVNWVRQAPGKGLEWLGMIWGDGNTDYNSALKSRLTISKDNSKSSVYLQMNSLRTEDTALYYCARDRVTATLYAMDYWGQGTLVTVSS

SEQ ID NO: 3087 - protein, 120 aa, Artificial Sequence
  Description of Artificial Sequence: Synthetic polypeptide
EVQLVESGGGLVQPGGSLRLSCAVSGFSLTAYGVNWVRQAPGKGLEWLGMIWGDGNTDYNSALKSRLTISKHNSKSTVYLQMNSLRAEDTAVYYCARDRVTATLYAMDYWGQGTLVTVSS

SEQ ID NO: 3088 - protein, 120 aa, Artificial Sequence
  Description of Artificial Sequence: Synthetic polypeptide
EVQLVESGGGLVKPGGSLRLSCAVSGFSLTAYGVNWVRQAPGKGLEWLGMIWGDGNTDYNSALKSRLTISKDNAKSSVYLQMNSLRAEDTAVYYCARDRVTATLYAMDYWGQGTLVTVSS

SEQ ID NO: 3089 - protein, 120 aa, Artificial Sequence
  Description of Artificial Sequence: Synthetic polypeptide
EVQLVESGGGLIQPGGSLRLSCAVSGFSLTAYGVNWVRQPPGKGLEWLGMIWGDGNTDYNSALKSRLTISKDNSKSTVYLQMNSLRAEDTAVYYCARDRVTATLYAMDYWGQGTLVTVSS

SEQ ID NO: 3090 - skipped

SEQ ID NO: 3091 - protein, 119 aa, Artificial Sequence
  Description of Artificial Sequence: Synthetic polypeptide
QVQLQQSGPELVKPGASVKISCKASGYAFSSSWMNWVKQRPGQGLEWIGRIYPGDGDTKYNGKFKGKATLTADKSSSTAYMHLSSLTSVDSAVYFCARRGTGGWYFDVWGAGTTVTVSS

SEQ ID NO: 3092 - protein, 111 aa, Artificial Sequence
  Description of Artificial Sequence: Synthetic polypeptide
DIVLTQSPASLAVSLGQRATISCRASESVDSSGNSFMHWYQQKPGQPPQLLIYRASNLESGIPARFSGSGSRTDFTLTINPVEADDVATFYCQQSFDDPFTFGSGTKLEIK

SEQ ID NO: 3093 - protein, 111 aa, Artificial Sequence
  Description of Artificial Sequence: Synthetic polypeptide
DIVLTQSPDSLAVSLGERATINCRASESVDSSGNSFMHWYQQKPGQPPQLLIYRASNLESGVPDRFSGSGSRTDFTLTISSLQAEDVAVYYCQQSFDDPFTFGQGTKLEIK

SEQ ID NO: 3094 - protein, 111 aa, Artificial Sequence
  Description of Artificial Sequence: Synthetic polypeptide
EIVLTQSPATLSLSPGERATLSCRASESVDSSGNSFMHWYQQKPGQAPQLLIYRASNLESGIPARFSGSGSRTDFTLTISSLEPEDFAVYYCQQSFDDPFTFGQGTKLEIK

SEQ ID NO: 3095 - protein, 111 aa, Artificial Sequence
  Description of Artificial Sequence: Synthetic polypeptide
EIVLTQSPATLSLSPGERATLSCRASESVDSSGNSFMHWYQQKPGQAPQLLIYRASNLESGIPARFSGSGSRTDFTLTISRLEPEDFAVYYCQQSFDDPFTFGQGTKLEIK

SEQ ID NO: 3096 - protein, 111 aa, Artificial Sequence
  Description of Artificial Sequence: Synthetic polypeptide
EIVLTQSPATLSLSPGERATLSCRASESVDSSGNSFMHWYQQKPGQAPQLLIYRASNLESGIPARFSGSGSRTDFTLTISSLQPEDFAVYYCQQSFDDPFTFGQGTKLEIK

SEQ ID NO: 3097 - protein, 111 aa, Artificial Sequence
  Description of Artificial Sequence: Synthetic polypeptide
DIQLTQSPSSLSASVGDRVTITCRASESVDSSGNSFMHWYQQKPGQAPQLLIYRASNLESGVPSRFSGSGSRTDFTLTISSLQPEDVATYYCQQSFDDPFTFGQGTKLEIK

SEQ ID NO: 3098 - protein, 111 aa, Artificial Sequence
  Description of Artificial Sequence: Synthetic polypeptide
EIVLTQSPATLSLSPGERATLSCRASESVDSSGNSFMHWYQQKPGQAPQLLIYRASNLESGIPARFSGSGPRTDFTLTISSLEPEDFAVYYCQQSFDDPFTFGQGTKLEIK

SEQ ID NO: 3099 - protein, 111 aa, Artificial Sequence
  Description of Artificial Sequence: Synthetic polypeptide
EIVLTQSPATLSLSPGERATLSCRASESVDSSGNSFMHWYQQKPGQAPQLLIYRASNLESGIPDRFSGSGSRTDFTLTISRLEPEDFAVYYCQQSFDDPFTFGQGTKLEIK

SEQ ID NO: 3100 - protein, 111 aa, Artificial Sequence
  Description of Artificial Sequence: Synthetic polypeptide
DIQLTQSPSSLSASVGDRVTITCRASESVDSSGNSFMHWYQQKPGKVPQLLIYRASNLESGVPSRFSGSGSRTDFTLTISSLQPEDVATYYCQQSFDDPFTFGQGTKLEIK

SEQ ID NO: 3101 - protein, 111 aa, Artificial Sequence
  Description of Artificial Sequence: Synthetic polypeptide
DIQLTQSPSSLSASVGDRVTITCRASESVDSSGNSFMHWYQQKPGKTPQLLIYRASNLESGIPSRFSGSGSRTDFTLTIRSLQPEDFATYYCQQSFDDPFTFGQGTKLEIK

SEQ ID NO: 3102 - protein, 111 aa, Artificial Sequence
  Description of Artificial Sequence: Synthetic polypeptide
EIVLTQSPGTLSLSPGERATLSCRASESVDSSGNSFMHWYQQKPGQAPQLLIYRASNLESGIPDRFSGSGSRTDFTLTISRLEPEDFAVYYCQQSFDDPFTFGQGTKLEIK

SEQ ID NO: 3103 - protein, 111 aa, Artificial Sequence
  Description of Artificial Sequence: Synthetic polypeptide
EIVLTQSPATLSLSPGERATLSCRASESVDSSGNSFMHWYQQKPGLAPQLLIYRASNLESGIPDRFSGSGSRTDFTLTISRLEPEDFAVYYCQQSFDDPFTFGQGTKLEIK

SEQ ID NO: 3104 - protein, 111 aa, Artificial Sequence
  Description of Artificial Sequence: Synthetic polypeptide
DIQLTQSPSSLSASVGDRVTITCRASESVDSSGNSFMHWYQQKPGKAPQLLIYRASNLESGVPSRFSGSGSRTDFTLTISSLQPEDFATYYCQQSFDDPFTFGQGTKLEIK

SEQ ID NO: 3105 - protein, 111 aa, Artificial Sequence
  Description of Artificial Sequence: Synthetic polypeptide
DIQLTQSPSSVSASVGDRVTITCRASESVDSSGNSFMHWYQQKPGKAPQLLIYRASNLESGVPSRFSGSGSRTDFTLTISSLQPEDFATYYCQQSFDDPFTFGQGTKLEIK

SEQ ID NO: 3106 - protein, 111 aa, Artificial Sequence
  Description of Artificial Sequence: Synthetic polypeptide
AIQLTQSPSSLSASVGDRVTITCRASESVDSSGNSFMHWYQQKPGKAPQLLIYRASNLESGVPSRFSGSGSRTDFTLTISSLQPEDFATYYCQQSFDDPFTFGQGTKLEIK

SEQ ID NO: 3107 - protein, 111 aa, Artificial Sequence
  Description of Artificial Sequence: Synthetic polypeptide
DIQLTQSPSFLSASVGDRVTITCRASESVDSSGNSFMHWYQQKPGKAPQLLIYRASNLESGVPSRFSGSGSRTEFTLTISSLQPEDFATYYCQQSFDDPFTFGQGTKLEIK

SEQ ID NO: 3108 - protein, 111 aa, Artificial Sequence
  Description of Artificial Sequence: Synthetic polypeptide
DIQLTQSPSSLSASVGDRVTITCRASESVDSSGNSFMHWYQQKPGKAPQLLIYRASNLESGVPSRFSGSGSRTDFTFTISSLQPEDIATYYCQQSFDDPFTFGQGTKLEIK

SEQ ID NO: 3109 - protein, 111 aa, Artificial Sequence
  Description of Artificial Sequence: Synthetic polypeptide
EIVLTQSPATLSVSPGERATLSCRASESVDSSGNSFMHWYQQKPGQAPQLLIYRASNLESGIPARFSGSGSRTEFTLTISILQSEDFAVYYCQQSFDDPFTFGQGTKLEIK

SEQ ID NO: 3110 - protein, 111 aa, Artificial Sequence
  Description of Artificial Sequence: Synthetic polypeptide
EIVLTQSPATLSVSPGERATLSCRASESVDSSGNSFMHWYQQKPGQAPQLLIYRASNLESGIPARFSGSGSRTEFTLTISSLQSEDFAVYYCQQSFDDPFTFGQGTKLEIK

SEQ ID NO: 3111 - protein, 111 aa, Artificial Sequence
  Description of Artificial Sequence: Synthetic polypeptide
AIRLTQSPFSLSASVGDRVTITCRASESVDSSGNSFMHWYQQKPAKAPQLFIYRASNLESGVPSRFSGSGSRTDFTLTISSLQPEDFATYYCQQSFDDPFTFGQGTKLEIK

SEQ ID NO: 3112 - protein, 111 aa, Artificial Sequence
  Description of Artificial Sequence: Synthetic polypeptide
DIQLTQSPSSLSASVGDRVTITCRASESVDSSGNSFMHWYQQKPGKAPQSLIYRASNLESGVPSRFSGSGSRTDFTLTISSLQPEDFATYYCQQSFDDPFTFGQGTKLEIK

SEQ ID NO: 3113 - protein, 111 aa, Artificial Sequence
  Description of Artificial Sequence: Synthetic polypeptide
DIQLTQSPSSLSASVGDRVTITCRASESVDSSGNSFMHWYQQKPGKAPQRLIYRASNLESGVPSRFSGSGSRTEFTLTISNLQPEDFATYYCQQSFDDPFTFGQGTKLEIK

SEQ ID NO: 3114 - protein, 111 aa, Artificial Sequence
  Description of Artificial Sequence: Synthetic polypeptide
DIQLTQSPSTLSASVGDRVTITCRASESVDSSGNSFMHWYQQKPGKAPQLLIYRASNLESGVPSRFSGSGSRTEFTLTISSLQPDDFATYYCQQSFDDPFTFGQGTKLEIK

SEQ ID NO: 3115 - protein, 111 aa, Artificial Sequence
  Description of Artificial Sequence: Synthetic polypeptide
EIVLTQSPDFQSVTPKEKVTITCRASESVDSSGNSFMHWYQQKPDQSPQLLIYRASNLESGVPSRFSGSGSRTDFTLTINSLEAEDAATYYCQQSFDDPFTFGQGTKLEIK

SEQ ID NO: 3116 - protein, 111 aa, Artificial Sequence
  Description of Artificial Sequence: Synthetic polypeptide
DIQLTQSPSSLSASVGDRVTITCRASESVDSSGNSFMHWYQQKPGKAPQSLIYRASNLESGVPSKFSGSGSRTDFTLTISSLQPEDFATYYCQQSFDDPFTFGQGTKLEIK

SEQ ID NO: 3117 - protein, 111 aa, Artificial Sequence
  Description of Artificial Sequence: Synthetic polypeptide
DIQLTQSPSSLSASVGDRVTITCRASESVDSSGNSFMHWYQQKPGKAPQRLIYRASNLESGVPSRFSGSGSRTEFTLTISSLQPEDFATYYCQQSFDDPFTFGQGTKLEIK

SEQ ID NO: 3118 - protein, 111 aa, Artificial Sequence
  Description of Artificial Sequence: Synthetic polypeptide
DIVLTQTPLSLSVTPGQPASISCRASESVDSSGNSFMHWYLQKPGQPPQLLIYRASNLESGVPDRFSGSGSRTDFTLKISRVEAEDVGVYYCQQSFDDPFTFGQGTKLEIK

SEQ ID NO: 3119 - protein, 111 aa, Artificial Sequence
  Description of Artificial Sequence: Synthetic polypeptide
DIQLTQSPSSLSASVGDRVTITCRASESVDSSGNSFMHWYQQKPEKAPQSLIYRASNLESGVPSRFSGSGSRTDFTLTISSLQPEDFATYYCQQSFDDPFTFGQGTKLEIK

SEQ ID NO: 3120 - protein, 111 aa, Artificial Sequence
  Description of Artificial Sequence: Synthetic polypeptide
EIVLTQSPPTLSLSPGERVTLSCRASESVDSSGNSFMHWYQQKPGQAPQLLIYRASNLESGIPARFSGSGSRTDFTLTISSLQPEDFAVYYCQQSFDDPFTFGQGTKLEIK

SEQ ID NO: 3121 - protein, 111 aa, Artificial Sequence
  Description of Artificial Sequence: Synthetic polypeptide
DIQLTQSPSAMSASVGDRVTITCRASESVDSSGNSFMHWYQQKPGKVPQRLIYRASNLESGVPSRFSGSGSRTEFTLTISSLQPEDFATYYCQQSFDDPFTFGQGTKLEIK

SEQ ID NO: 3122 - protein, 111 aa, Artificial Sequence
  Description of Artificial Sequence: Synthetic polypeptide
DIVLTQSPLSLPVTPGEPASISCRASESVDSSGNSFMHWYLQKPGQSPQLLIYRASNLESGVPDRFSGSGSRTDFTLKISRVEAEDVGVYYCQQSFDDPFTFGQGTKLEIK

SEQ ID NO: 3123 - protein, 111 aa, Artificial Sequence
  Description of Artificial Sequence: Synthetic polypeptide
DIVLTQTPLSLPVTPGEPASISCRASESVDSSGNSFMHWYLQKPGQSPQLLIYRASNLESGVPDRFSGSGSRTDFTLKISRVEAEDVGVYYCQQSFDDPFTFGQGTKLEIK

SEQ ID NO: 3124 - protein, 111 aa, Artificial Sequence
  Description of Artificial Sequence: Synthetic polypeptide
DIVLTQTPLSLSVTPGQPASISCRASESVDSSGNSFMHWYLQKPGQSPQLLIYRASNLESGVPDRFSGSGSRTDFTLKISRVEAEDVGVYYCQQSFDDPFTFGQGTKLEIK

SEQ ID NO: 3125 - protein, 111 aa, Artificial Sequence
  Description of Artificial Sequence: Synthetic polypeptide
EIVLTQSPPTLSLSPGERVTLSCRASESVDSSGNSFMHWYQQKPGQAPQLLIYRASNLESSIPARFSGSGSRTDFTLTISSLQPEDFAVYYCQQSFDDPFTFGQGTKLEIK

SEQ ID NO: 3126 - protein, 111 aa, Artificial Sequence
  Description of Artificial Sequence: Synthetic polypeptide
DIVLTQSPLSLPVTLGQPASISCRASESVDSSGNSFMHWYQQRPGQSPQRLIYRASNLESGVPDRFSGSGSRTDFTLKISRVEAEDVGVYYCQQSFDDPFTFGQGTKLEIK

SEQ ID NO: 3127 - protein, 111 aa, Artificial Sequence
  Description of Artificial Sequence: Synthetic polypeptide
DIVLTQTPLSSPVTLGQPASISCRASESVDSSGNSFMHWYQQRPGQPPQLLIYRASNLESGVPDRFSGSGARTDFTLKISRVEAEDVGVYYCQQSFDDPFTFGQGTKLEIK

SEQ ID NO: 3128 - protein, 111 aa, Artificial Sequence
  Description of Artificial Sequence: Synthetic polypeptide
DIVLTQSPAFLSVTPGEKVTITCRASESVDSSGNSFMHWYQQKPDQAPQLLIYRASNLESGVPSRFSGSGSRTDFTFTISSLEAEDAATYYCQQSFDDPFTFGQGTKLEIK

SEQ ID NO: 3129 - protein, 111 aa, Artificial Sequence
  Description of Artificial Sequence: Synthetic polypeptide
DIQLIQSPSFLSASVGDRVSIICRASESVDSSGNSFMHWYLQKPGKSPQLFIYRASNLESGVSSRFSGRGSRTDFTLTIISLKPEDFAAYYCQQSFDDPFTFGQGTKLEIK

SEQ ID NO: 3130 - protein, 111 aa, Artificial Sequence
  Description of Artificial Sequence: Synthetic polypeptide
EIVLTQTPLSLSITPGEQASISCRASESVDSSGNSFMHWYLQKARPVPQLLIYRASNLESGVPDRFSGSGSRTDFTLKISRVEAEDFGVYYCQQSFDDPFTFGQGTKLEIK

SEQ ID NO: 3131 - protein, 111 aa, Artificial Sequence
  Description of Artificial Sequence: Synthetic polypeptide
EIVLTQTPLSLSITPGEQASMSCRASESVDSSGNSFMHWYLQKARPVPQLLIYRASNLESGVPDRFSGSGSRTDFTLKISRVEAEDFGVYYCQQSFDDPFTFGQGTKLEIK

SEQ ID NO: 3132 - protein, 111 aa, Artificial Sequence
  Description of Artificial Sequence: Synthetic polypeptide
EITLTQSPAFMSATPGDKVNISCRASESVDSSGNSFMHWYQQKPGEAPQFIIYRASNLESGIPPRFSGSGYRTDFTLTINNIESEDAAYYYCQQSFDDPFTFGQGTKLEIK

SEQ ID NO: 3133 - protein, 119 aa, Artificial Sequence
  Description of Artificial Sequence: Synthetic polypeptide
QVQLVQSGAEVKKPGASVKVSCKASGYAFSSSWMNWVRQAPGQGLEWIGRIYPGDGDTKYNGKFKGRATLTADKSTSTAYMELSSLRSEDTAVYYCARRGTGGWYFDVWGQGTTVTVSS

SEQ ID NO: 3134 - protein, 119 aa, Artificial Sequence
  Description of Artificial Sequence: Synthetic polypeptide
QVQLVQSGAEVKKPGSSVKVSCKASGYAFSSSWMNWVRQAPGQGLEWIGRIYPGDGDTKYNGKFKGRATLTADKSTSTAYMELSSLRSEDTAVYYCARRGTGGWYFDVWGQGTTVTVSS

SEQ ID NO: 3135 - protein, 119 aa, Artificial Sequence
  Description of Artificial Sequence: Synthetic polypeptide
QVQLVQSGAEVKKPGASVKVSCKASGYAFSSSWMNWVRQAPGKGLEWIGRIYPGDGDTKYNGKFKGRATLTADKSTSTAYMELSSLRSEDTAVYYCARRGTGGWYFDVWGQGTTVTVSS

SEQ ID NO: 3136 - protein, 119 aa, Artificial Sequence
  Description of Artificial Sequence: Synthetic polypeptide
QVQLVQSGAEVKKPGASVKVSCKASGYAFSSSWMNWVRQAPGQELEWIGRIYPGDGDTKYNGKFKGRATLTADKSISTAYMELSSLRSEDTATYYCARRGTGGWYFDVWGQGTTVTVSS

SEQ ID NO: 3137 - protein, 119 aa, Artificial Sequence
  Description of Artificial Sequence: Synthetic polypeptide
EVQLVQSGAEVKKPGATVKISCKASGYAFSSSWMNWVQQAPGKGLEWIGRIYPGDGDTKYNGKFKGRATLTADKSTSTAYMELSSLRSEDTAVYYCARRGTGGWYFDVWGQGTTVTVSS

SEQ ID NO: 3138 - protein, 119 aa, Artificial Sequence
  Description of Artificial Sequence: Synthetic polypeptide
QVQLVQSGAEVKKTGSSVKVSCKASGYAFSSSWMNWVRQAPGQALEWIGRIYPGDGDTKYNGKFKGRATLTADKSMSTAYMELSSLRSEDTAMYYCARRGTGGWYFDVWGQGTTVTVSS

SEQ ID NO: 3139 - protein, 119 aa, Artificial Sequence
  Description of Artificial Sequence: Synthetic polypeptide
QVQLVQSGAEVKKPGASVKVSCKASGYAFSSSWMNWVRQAPGQRLEWIGRIYPGDGDTKYNGKFKGRATLTADKSASTAYMELSSLRSEDMAVYYCARRGTGGWYFDVWGQGTTVTVSS

SEQ ID NO: 3140 - protein, 119 aa, Artificial Sequence
  Description of Artificial Sequence: Synthetic polypeptide
QVQLVQSGAEVKKPGASVKVSCKASGYAFSSSWMNWVRQAPGQGLEWIGRIYPGDGDTKYNGKFKGRATLTADKSTSTAYMELRSLRSDDMAVYYCARRGTGGWYFDVWGQGTTVTVSS

SEQ ID NO: 3141 - protein, 119 aa, Artificial Sequence
  Description of Artificial Sequence: Synthetic polypeptide
QVQLVQSGAEVKKPGASVKVSCKASGYAFSSSWMNWVRQAPGQRLEWIGRIYPGDGDTKYNGKFKGRATLTADKSASTAYMELSSLRSEDTAVYYCARRGTGGWYFDVWGQGTTVTVSS

SEQ ID NO: 3142 - protein, 119 aa, Artificial Sequence
  Description of Artificial Sequence: Synthetic polypeptide
QVQLVQSGAEVKKPGASVKVSCKASGYAFSSSWMNWVRQAPGQGLEWIGRIYPGDGDTKYNGKFKGRATLTADKSTSTAYMELRSLRSDDTAVYYCARRGTGGWYFDVWGQGTTVTVSS

SEQ ID NO: 3143 - protein, 119 aa, Artificial Sequence
  Description of Artificial Sequence: Synthetic polypeptide
QVQLVQSGAEVKKPGASVKVSCKASGYAFSSSWMNWVRQAPGQGLEWIGRIYPGDGDTKYNGKFKGRATLTADKSISTAYMELSRLRSDDTAVYYCARRGTGGWYFDVWGQGTTVTVSS

SEQ ID NO: 3144 - protein, 119 aa, Artificial Sequence
  Description of Artificial Sequence: Synthetic polypeptide
QVQLVQSGAEVKKPGASVKVSCKASGYAFSSSWMNWVRQAPGQGLEWIGRIYPGDGDTKYNGKFKGRATLTADKSISTAYMELSRLRSDDTVVYYCARRGTGGWYFDVWGQGTTVTVSS

SEQ ID NO: 3145 - protein, 119 aa, Artificial Sequence
  Description of Artificial Sequence: Synthetic polypeptide
QVQLVQSGAEVKKPGASVKVSCKASGYAFSSSWMNWVRQAPGQGLEWIGRIYPGDGDTKYNGKFKGWATLTADKSISTAYMELSRLRSDDTAVYYCARRGTGGWYFDVWGQGTTVTVSS

SEQ ID NO: 3146 - protein, 119 aa, Artificial Sequence
  Description of Artificial Sequence: Synthetic polypeptide
QVQLVQSGAEVKKPGASVKVSCKASGYAFSSSWMNWVRQATGQGLEWIGRIYPGDGDTKYNGKFKGRATLTANKSISTAYMELSSLRSEDTAVYYCARRGTGGWYFDVWGQGTTVTVSS

SEQ ID NO: 3147 - protein, 119 aa, Artificial Sequence
  Description of Artificial Sequence: Synthetic polypeptide
QVQLVQSGSELKKPGASVKVSCKASGYAFSSSWMNWVRQAPGQGLEWIGRIYPGDGDTKYNGKFKGRAVLSADKSVSTAYLQISSLKAEDTAVYYCARRGTGGWYFDVWGQGTTVTVSS

SEQ ID NO: 3148 - protein, 119 aa, Artificial Sequence
  Description of Artificial Sequence: Synthetic polypeptide
QVQLVQSGPEVKKPGTSVKVSCKASGYAFSSSWMNWVRQARGQRLEWIGRIYPGDGDTKYNGKFKGRATLTADKSTSTAYMELSSLRSEDTAVYYCARRGTGGWYFDVWGQGTTVTVSS

SEQ ID NO: 3149 - protein, 119 aa, Artificial Sequence
  Description of Artificial Sequence: Synthetic polypeptide
EVQLVQSGAEVKKPGESLKISCKASGYAFSSSWMNWVRQMPGKGLEWIGRIYPGDGDTKYNGKFKGQATLSADKSISTAYLQWSSLKASDTAMYYCARRGTGGWYFDVWGQGTTVTVSS

SEQ ID NO: 3150 - protein, 119 aa, Artificial Sequence
  Description of Artificial Sequence: Synthetic polypeptide
QVQLVQSGSELKKPGASVKVSCKASGYAFSSSWMNWVRQAPGQGLEWIGRIYPGDGDTKYNGKFKGRAVLSADKSVSMAYLQISSLKAEDTAVYYCARRGTGGWYFDVWGQGTTVTVSS

SEQ ID NO: 3151 - protein, 119 aa, Artificial Sequence
  Description of Artificial Sequence: Synthetic polypeptide
QVQLVQSGHEVKQPGASVKVSCKASGYAFSSSWMNWVPQAPGQGLEWIGRIYPGDGDTKYNGKFKGRAVLSADKSASTAYLQISSLKAEDMAMYYCARRGTGGWYFDVWGQGTTVTVSS

SEQ ID NO: 3152 - protein, 119 aa, Artificial Sequence
  Description of Artificial Sequence: Synthetic polypeptide
EVQLVQSGAEVKKPGESLKISCKASGYAFSSSWMNWVRQMPGKGLEWIGRIYPGDGDTKYNGKFKGQATLSADKPISTAYLQWSSLKASDTAMYYCARRGTGGWYFDVWGQGTTVTVSS

SEQ ID NO: 3153 - protein, 119 aa, Artificial Sequence
  Description of Artificial Sequence: Synthetic polypeptide
EVQLVQSGAEVKKPGESLRISCKASGYAFSSSWMNWVRQMPGKGLEWIGRIYPGDGDTKYNGKFKGQATLSADKSISTAYLQWSSLKASDTAMYYCARRGTGGWYFDVWGQGTTVTVSS

SEQ ID NO: 3154 - protein, 119 aa, Artificial Sequence
  Description of Artificial Sequence: Synthetic polypeptide
EVQLVQSGAEVKKPGESLRISCKASGYAFSSSWMNWVRQMPGKGLEWIGRIYPGDGDTKYNGKFKGHATLSADKSISTAYLQWSSLKASDTAMYYCARRGTGGWYFDVWGQGTTVTVSS

SEQ ID NO: 3155 - protein, 119 aa, Artificial Sequence
  Description of Artificial Sequence: Synthetic polypeptide
QVQLVQSGAEVKKTGSSVKVSCKASGYAFSSSWMNWVRQAPRQALEWIGRIYPGDGDTKYNGKFKGRATLTADKSMSTAYMELSSLRSEDTAMYYCARRGTGGWYFDVWGQGTTVTVSS

SEQ ID NO: 3156 - protein, 119 aa, Artificial Sequence
  Description of Artificial Sequence: Synthetic polypeptide
EVQLVESGGGLVQPGRSLRLSCTASGYAFSSSWMNWVRQAPGKGLEWIGRIYPGDGDTKYNGKFKGRATLSADKSKSIAYLQMNSLKTEDTAVYYCARRGTGGWYFDVWGQGTTVTVSS

SEQ ID NO: 3157 - protein, 119 aa, Artificial Sequence
  Description of Artificial Sequence: Synthetic polypeptide
EVQLVESGGGLVQPGPSLRLSCTASGYAFSSSWMNWVRQAPGKGLEWIGRIYPGDGDTKYNGKFKGRATLSADKSKSIAYLQMNSLKTEDTAVYYCARRGTGGWYFDVWGQGTTVTVSS

SEQ ID NO: 3158 - protein, 119 aa, Artificial Sequence
  Description of Artificial Sequence: Synthetic polypeptide
QVQLQESGPGLVKPSQTLSLTCTASGYAFSSSWMNWVRQPPGKGLEWIGRIYPGDGDTKYNGKFKGRATLSADKSKSQASLKLSSVTAADTAVYYCARRGTGGWYFDVWGQGTTVTVSS

SEQ ID NO: 3159 - protein, 119 aa, Artificial Sequence
  Description of Artificial Sequence: Synthetic polypeptide
QVQLQESGPGLVKPSGTLSLTCAASGYAFSSSWMNWVRQPPGKGLEWIGRIYPGDGDTKYNGKFKGRATLSADKSKSQASLKLSSVTAADTAVYYCARRGTGGWYFDVWGQGTTVTVSS

SEQ ID NO: 3160 - protein, 119 aa, Artificial Sequence
  Description of Artificial Sequence: Synthetic polypeptide
EVQLVESGGGLVKPGRSLRLSCTASGYAFSSSWMNWVRQAPGKGLEWIGRIYPGDGDTKYNGKFKGRATLSADKSKSIAYLQMNSLKTEDTAVYYCARRGTGGWYFDVWGQGTTVTVSS

SEQ ID NO: 3161 - protein, 119 aa, Artificial Sequence
  Description of Artificial Sequence: Synthetic polypeptide
EVQLVESGGGLVQPGGSLKLSCAASGYAFSSSWMNWVRQASGKGLEWIGRIYPGDGDTKYNGKFKGRATLSADKSKSTAYLQMNSLKTEDTAVYYCARRGTGGWYFDVWGQGTTVTVSS

SEQ ID NO: 3162 - protein, 119 aa, Artificial Sequence
  Description of Artificial Sequence: Synthetic polypeptide
QVQLQESGPGLVKPSQTLSLTCAASGYAFSSSWMNWVRQPPGKGLEWIGRIYPGDGDTKYNGKFKGRATLSADKSKSQASLKLSSVTAADTAVYYCARRGTGGWYFDVWGQGTTVTVSS

SEQ ID NO: 3163 - protein, 119 aa, Artificial Sequence
  Description of Artificial Sequence: Synthetic polypeptide
EVQLVESGGGLVKPGGSLRLSCAASGYAFSSSWMNWVRQAPGKGLEWIGRIYPGDGDTKYNGKFKGRATLSADKSKSTAYLQMNSLKTEDTAVYYCARRGTGGWYFDVWGQGTTVTVSS

SEQ ID NO: 3164 - protein, 119 aa, Artificial Sequence
  Description of Artificial Sequence: Synthetic polypeptide
EVQLVESGGALVKPGGSLRLSCAASGYAFSSSWMNWVRQAPGKGLEWIGRIYPGDGDTKYNGKFKGRATLSADKSKSTAYLQMNSLKTEDTAVYYCARRGTGGWYFDVWGQGTTVTVSS

SEQ ID NO: 3165 - protein, 119 aa, Artificial Sequence
  Description of Artificial Sequence: Synthetic polypeptide
QVQLQESGPGLVKPSQTLSLTCAAYGYAFSSSWMNWVRQPPGKGLEWIGRIYPGDGDTKYNGKFKGRATLSADKSKSQASLKLSSVTAADTAVYYCARRGTGGWYFDVWGQGTTVTVSS

SEQ ID NO: 3166 - protein, 119 aa, Artificial Sequence
  Description of Artificial Sequence: Synthetic polypeptide
QVQLQESGSGLVKPSQTLSLTCAASGYAFSSSWMNWVRQPPGKGLEWIGRIYPGDGDTKYNGKFKGRATLSADKSKSQASLKLSSVTAADTAVYYCARRGTGGWYFDVWGQGTTVTVSS

SEQ ID NO: 3167 - protein, 119 aa, Artificial Sequence
  Description of Artificial Sequence: Synthetic polypeptide
EVQLVESGGGLVQPGGSLRLSCAASGYAFSSSWMNWVRQAPGKGLEWIGRIYPGDGDTKYNGKFKGRATLSADKSKSSAYLQMNSLKTEDTAVYYCARRGTGGWYFDVWGQGTTVTVSS

SEQ ID NO: 3168 - protein, 119 aa, Artificial Sequence
  Description of Artificial Sequence: Synthetic polypeptide
QVQLQESGPGLVKPSDTLSLTCTASGYAFSSSWMNWVRQPPGKGLEWIGRIYPGDGDTKYNGKFKGRATLSADKSKSQASLKLSSVTAADTAVYYCARRGTGGWYFDVWGQGTTVTVSS

SEQ ID NO: 3169 - protein, 119 aa, Artificial Sequence
  Description of Artificial Sequence: Synthetic polypeptide
QVQLQESGPGLVKPSQTLSLTCTASGYAFSSSWMNWVRQHPGKGLEWIGRIYPGDGDTKYNGKFKGRATLSADKSKSQASLKLSSVTAADTAVYYCARRGTGGWYFDVWGQGTTVTVSS

SEQ ID NO: 3170 - protein, 119 aa, Artificial Sequence
  Description of Artificial Sequence: Synthetic polypeptide
QVQLQESGPGLVKPSQTLSLTCTASGYAFSSSWMNWVRQHPGKGLEWIGRIYPGDGDTKYNGKFKGLATLSADKSKSQASLKLSSVTAADTAVYYCARRGTGGWYFDVWGQGTTVTVSS

SEQ ID NO: 3171 - protein, 119 aa, Artificial Sequence
  Description of Artificial Sequence: Synthetic polypeptide
QVQLVESGGGVVQPGRSLRLSCAASGYAFSSSWMNWVRQAPGKGLEWIGRIYPGDGDTKYNGKFKGRATLSADKSKSTAYLQMSSLRAEDTAVYYCARRGTGGWYFDVWGQGTTVTVSS

SEQ ID NO: 3172 - protein, 119 aa, Artificial Sequence
  Description of Artificial Sequence: Synthetic polypeptide
QVQLVESGGGLVKPGGSLRLSCAASGYAFSSSWMNWVRQAPGKGLEWIGRIYPGDGDTKYNGKFKGRATLSADKAKSSAYLQMNSLRAEDTAVYYCARRGTGGWYFDVWGQGTTVTVSS

SEQ ID NO: 3173 - protein, 119 aa, Artificial Sequence
  Description of Artificial Sequence: Synthetic polypeptide
QVQLVESGGGLVQPGGSLRLSCSASGYAFSSSWMNWVRQAPGKGLEWIGRIYPGDGDTKYNGKFKGRATLSADKSKSTAYLQMNSLRAEDTAVYYCARRGTGGWYFDVWGQGTTVTVSS

SEQ ID NO: 3174 - protein, 119 aa, Artificial Sequence
  Description of Artificial Sequence: Synthetic polypeptide
QVQLLESGGGLVKPGGSLRLSCAASGYAFSSSWMNWVRQAPGKGLEWIGRIYPGDGDTKYNGKFKGRATLSADKAKSSAYLQMNSLRAEDTAVYYCARRGTGGWYFDVWGQGTTVTVSS

SEQ ID NO: 3175 - protein, 119 aa, Artificial Sequence
  Description of Artificial Sequence: Synthetic polypeptide
EVQLVESGGGLVQPGGSLRLSCSASGYAFSSSWMNWVRQAPGKGLEWIGRIYPGDGDTKYNGKFKGRATLSADKSKSTAYLQMSSLRAEDTAVYYCARRGTGGWYFDVWGQGTTVTVSS

SEQ ID NO: 3176 - protein, 119 aa, Artificial Sequence
  Description of Artificial Sequence: Synthetic polypeptide
QVQLQESGPGLVKPSDTLSLTCAASGYAFSSSWMNWVRQPPGKGLEWIGRIYPGDGDTKYNGKFKGRATLSADKSKSQASLKLSSVTAVDTAVYYCARRGTGGWYFDVWGQGTTVTVSS

SEQ ID NO: 3177 - protein, 119 aa, Artificial Sequence
  Description of Artificial Sequence: Synthetic polypeptide
QVQLQESGPGLVKPSQTLSLTCAASGYAFSSSWMNWVRQPPGKGLEWIGRIYPGDGDTKYNGKFKGRATLSADKSKSQASLKLSSVTAVDTAVYYCARRGTGGWYFDVWGQGTTVTVSS

SEQ ID NO: 3178 - protein, 119 aa, Artificial Sequence
  Description of Artificial Sequence: Synthetic polypeptide
EVQLVESGGGLVQPGGSLRLSCSASGYAFSSSWMNWVRQAPGKGLEWIGRIYPGDGDTKYNGKFKGRATLSADKSKSTAYVQMSSLRAEDTAVYYCARRGTGGWYFDVWGQGTTVTVSS

SEQ ID NO: 3179 - protein, 119 aa, Artificial Sequence
  Description of Artificial Sequence: Synthetic polypeptide
QVQLVDSGGGVVQPGRSLRLSCAASGYAFSSSWMNWVRQAPGKGLEWIGRIYPGDGDTKYNGKFKGRATLSADKSKSTAYLQMNSLRAEDTAVYYCARRGTGGWYFDVWGQGTTVTVSS

SEQ ID NO: 3180 - protein, 119 aa, Artificial Sequence
  Description of Artificial Sequence: Synthetic polypeptide
QVQLVESGGGVVQPGRSLRLSCAASGYAFSSSWMNWVRQAPGKGLEWIGRIYPGDGDTKYNGKFKGRATLSADKSKSTAYLQMNSLRAEGTAVYYCARRGTGGWYFDVWGQGTTVTVSS

SEQ ID NO: 3181 - protein, 119 aa, Artificial Sequence
  Description of Artificial Sequence: Synthetic polypeptide
QVQLVESGGGVVQPGRSLRLSCAASGYAFSSSWMNWVRQAPGKGLEWIGRIYPGDGDTKYNGKFKGRATLSADKSKSTAYLQMNSLRAEDTAVYYCARRGTGGWYFDVWGQGTTVTVSS

SEQ ID NO: 3182 - protein, 119 aa, Artificial Sequence
  Description of Artificial Sequence: Synthetic polypeptide
EVQLVESGGGLVQPGGSLRLSCAASGYAFSSSWMNWVRQAPGKGLEWIGRIYPGDGDTKYNGKFKGRATLSADKSKSTAYLQMNSLRAEDTAVYYCARRGTGGWYFDVWGQGTTVTVSS

SEQ ID NO: 3183 - protein, 117 aa, Artificial Sequence
  Description of Artificial Sequence: Synthetic polypeptide
EVQLVESGGDLVKPGGSLKLSCAVSGFTFRSYGMSWVRQTPDKRLEWVALISSGGSYTYYTDSVKGRFTISRDNAKNTLYLQMSSLKSEDTAIYYCSRHGGNFFDYWGQGTTLTVSS

SEQ ID NO: 3184 - protein, 107 aa, Artificial Sequence
  Description of Artificial Sequence: Synthetic polypeptide
QIVLTQSPSIMSASPGEKVTMTCSVSSSVSYMHWYQQKSGTSPKRWIYDTSKLASGVPARFSGSGSGTSYSLTISSMEAEDAATYYCQQWSSNPQYTFGGGTKLEIK

SEQ ID NO: 3185 - protein, 107 aa, Artificial Sequence
  Description of Artificial Sequence: Synthetic polypeptide
DIVLTQSPAFLSVTPGEKVTITCSVSSSVSYMHWYQQKPDQAPKLLIYDTSKLASGVPSRFSGSGSGTDYTFTISSLEAEDAATYYCQQWSSNPQYTFGQGTKLEIK

SEQ ID NO: 3186 - protein, 107 aa, Artificial Sequence
  Description of Artificial Sequence: Synthetic polypeptide
AIQLTQSPSSLSASVGDRVTITCSVSSSVSYMHWYQQKPGKAPKLLIYDTSKLASGVPSRFSGSGSGTDYTLTISSLQPEDFATYYCQQWSSNPQYTFGQGTKLEIK

SEQ ID NO: 3187 - protein, 107 aa, Artificial Sequence
  Description of Artificial Sequence: Synthetic polypeptide
DIQLTQSPSFLSASVGDRVTITCSVSSSVSYMHWYQQKPGKAPKLLIYDTSKLASGVPSRFSGSGSGTEYTLTISSLQPEDFATYYCQQWSSNPQYTFGQGTKLEIK

SEQ ID NO: 3188 - protein, 107 aa, Artificial Sequence
  Description of Artificial Sequence: Synthetic polypeptide
DIQLTQSPSSLSASVGDRVTITCSVSSSVSYMHWYQQKPGKAPKLLIYDTSKLASGVPSRFSGSGSGTDYTLTISSLQPEDFATYYCQQWSSNPQYTFGQGTKLEIK

SEQ ID NO: 3189 - protein, 107 aa, Artificial Sequence
  Description of Artificial Sequence: Synthetic polypeptide
DIQLTQSPSSVSASVGDRVTITCSVSSSVSYMHWYQQKPGKAPKLLIYDTSKLASGVPSRFSGSGSGTDYTLTISSLQPEDFATYYCQQWSSNPQYTFGQGTKLEIK

SEQ ID NO: 3190 - protein, 107 aa, Artificial Sequence
  Description of Artificial Sequence: Synthetic polypeptide
DIQLTQSPSSLSASVGDRVTITCSVSSSVSYMHWYQQKPGKVPKLLIYDTSKLASGVPSRFSGSGSGTDYTLTISSLQPEDVATYYCQQWSSNPQYTFGQGTKLEIK

SEQ ID NO: 3191 - protein, 107 aa, Artificial Sequence
  Description of Artificial Sequence: Synthetic polypeptide
DIQLTQSPSSLSASVGDRVTITCSVSSSVSYMHWYQQKPGQAPKLLIYDTSKLASGVPSRFSGSGSGTDYTLTISSLQPEDVATYYCQQWSSNPQYTFGQGTKLEIK

SEQ ID NO: 3192 - protein, 107 aa, Artificial Sequence
  Description of Artificial Sequence: Synthetic polypeptide
EIVLTQSPDFQSVTPKEKVTITCSVSSSVSYMHWYQQKPDQSPKLLIYDTSKLASGVPSRFSGSGSGTDYTLTINSLEAEDAATYYCQQWSSNPQYTFGQGTKLEIK

SEQ ID NO: 3193 - protein, 107 aa, Artificial Sequence
  Description of Artificial Sequence: Synthetic polypeptide
AIRLTQSPFSLSASVGDRVTITCSVSSSVSYMHWYQQKPAKAPKLFIYDTSKLASGVPSRFSGSGSGTDYTLTISSLQPEDFATYYCQQWSSNPQYTFGQGTKLEIK

SEQ ID NO: 3194 - protein, 107 aa, Artificial Sequence
  Description of Artificial Sequence: Synthetic polypeptide
DIQLTQSPSSLSASVGDRVTITCSVSSSVSYMHWYQQKPGKAPKLLIYDTSKLASGVPSRFSGSGSGTDYTFTISSLQPEDIATYYCQQWSSNPQYTFGQGTKLEIK

SEQ ID NO: 3195 - protein, 107 aa, Artificial Sequence
  Description of Artificial Sequence: Synthetic polypeptide
EIVLTQSPATLSLSPGERATLSCSVSSSVSYMHWYQQKPGQAPKLLIYDTSKLASGIPARFSGSGSGTDYTLTISSLEPEDFAVYYCQQWSSNPQYTFGQGTKLEIK

SEQ ID NO: 3196 - protein, 107 aa, Artificial Sequence
  Description of Artificial Sequence: Synthetic polypeptide
DIQLTQSPSTLSASVGDRVTITCSVSSSVSYMHWYQQKPGKAPKLLIYDTSKLASGVPSRFSGSGSGTEYTLTISSLQPDDFATYYCQQWSSNPQYTFGQGTKLEIK

SEQ ID NO: 3197 - protein, 107 aa, Artificial Sequence
  Description of Artificial Sequence: Synthetic polypeptide
DIQLTQSPSSLSASVGDRVTITCSVSSSVSYMHWYQQKPGKTPKLLIYDTSKLASGIPSRFSGSGSGTDYTLTIRSLQPEDFATYYCQQWSSNPQYTFGQGTKLEIK

SEQ ID NO: 3198 - protein, 107 aa, Artificial Sequence
  Description of Artificial Sequence: Synthetic polypeptide
EIVLTQSPPTLSLSPGERVTLSCSVSSSVSYMHWYQQKPGQAPKLLIYDTSKLASGIPARFSGSGSGTDYTLTISSLQPEDFAVYYCQQWSSNPQYTFGQGTKLEIK

SEQ ID NO: 3199 - protein, 107 aa, Artificial Sequence
  Description of Artificial Sequence: Synthetic polypeptide
DIQLTQSPSSLSASVGDRVTITCSVSSSVSYMHWYQQKPGKAPKRLIYDTSKLASGVPSRFSGSGSGTEYTLTISSLQPEDFATYYCQQWSSNPQYTFGQGTKLEIK

SEQ ID NO: 3200 - protein, 107 aa, Artificial Sequence
  Description of Artificial Sequence: Synthetic polypeptide
EIVLTQSPATLSLSPGERATLSCSVSSSVSYMHWYQQKPGQAPKLLIYDTSKLASGIPARFSGSGPGTDYTLTISSLEPEDFAVYYCQQWSSNPQYTFGQGTKLEIK

SEQ ID NO: 3201 - protein, 107 aa, Artificial Sequence
  Description of Artificial Sequence: Synthetic polypeptide
EIVLTQSPATLSLSPGERATLSCSVSSSVSYMHWYQQKPGQAPKLLIYDTSKLASGIPARFSGSGSGTDYTLTISRLEPEDFAVYYCQQWSSNPQYTFGQGTKLEIK

SEQ ID NO: 3202 - protein, 107 aa, Artificial Sequence
  Description of Artificial Sequence: Synthetic polypeptide
EIVLTQSPATLSLSPGERATLSCSVSSSVSYMHWYQQKPGQAPKLLIYDTSKLASGIPARFSGSGSGTDYTLTISSLQPEDFAVYYCQQWSSNPQYTFGQGTKLEIK

SEQ ID NO: 3203 - protein, 107 aa, Artificial Sequence
  Description of Artificial Sequence: Synthetic polypeptide
EIVLTQSPATLSVSPGERATLSCSVSSSVSYMHWYQQKPGQAPKLLIYDTSKLASGIPARFSGSGSGTEYTLTISSLQSEDFAVYYCQQWSSNPQYTFGQGTKLEIK

SEQ ID NO: 3204 - protein, 107 aa, Artificial Sequence
  Description of Artificial Sequence: Synthetic polypeptide
EIVLTQSPATLSVSPGERATLSCSVSSSVSYMHWYQQKPGQAPKLLIYDTSKLASGIPARFSGSGSGTEYTLTISILQSEDFAVYYCQQWSSNPQYTFGQGTKLEIK

SEQ ID NO: 3205 - protein, 107 aa, Artificial Sequence
  Description of Artificial Sequence: Synthetic polypeptide
EIVLTQSPPTLSLSPGERVTLSCSVSSSVSYMHWYQQKPGQAPKLLIYDTSKLASSIPARFSGSGSGTDYTLTISSLQPEDFAVYYCQQWSSNPQYTFGQGTKLEIK

SEQ ID NO: 3206 - protein, 107 aa, Artificial Sequence
  Description of Artificial Sequence: Synthetic polypeptide
DIQLTQSPSSLSASVGDRVTITCSVSSSVSYMHWYQQKPGKAPKSLIYDTSKLASGVPSRFSGSGSGTDYTLTISSLQPEDFATYYCQQWSSNPQYTFGQGTKLEIK

SEQ ID NO: 3207 - protein, 107 aa, Artificial Sequence
  Description of Artificial Sequence: Synthetic polypeptide
DIQLTQSPSSLSASVGDRVTITCSVSSSVSYMHWYQQKPGKAPKRLIYDTSKLASGVPSRFSGSGSGTEYTLTISNLQPEDFATYYCQQWSSNPQYTFGQGTKLEIK

SEQ ID NO: 3208 - protein, 107 aa, Artificial Sequence
  Description of Artificial Sequence: Synthetic polypeptide
DIQLTQSPSAMSASVGDRVTITCSVSSSVSYMHWYQQKPGKVPKRLIYDTSKLASGVPSRFSGSGSGTEYTLTISSLQPEDFATYYCQQWSSNPQYTFGQGTKLEIK

SEQ ID NO: 3209 - protein, 107 aa, Artificial Sequence
  Description of Artificial Sequence: Synthetic polypeptide
EIVLTQSPATLSLSPGERATLSCSVSSSVSYMHWYQQKPGQAPKLLIYDTSKLASGIPDRFSGSGSGTDYTLTISRLEPEDFAVYYCQQWSSNPQYTFGQGTKLEIK

SEQ ID NO: 3210 - protein, 107 aa, Artificial Sequence
  Description of Artificial Sequence: Synthetic polypeptide
EIVLTQSPATLSLSPGERATLSCSVSSSVSYMHWYQQKPGLAPKLLIYDTSKLASGIPDRFSGSGSGTDYTLTISRLEPEDFAVYYCQQWSSNPQYTFGQGTKLEIK

SEQ ID NO: 3211 - protein, 107 aa, Artificial Sequence
  Description of Artificial Sequence: Synthetic polypeptide
EIVLTQSPGTLSLSPGERATLSCSVSSSVSYMHWYQQKPGQAPKLLIYDTSKLASGIPDRFSGSGSGTDYTLTISRLEPEDFAVYYCQQWSSNPQYTFGQGTKLEIK

SEQ ID NO: 3212 - protein, 107 aa, Artificial Sequence
  Description of Artificial Sequence: Synthetic polypeptide
DIQLTQSPSSLSASVGDRVTITCSVSSSVSYMHWYQQKPGKAPKSLIYDTSKLASGVPSKFSGSGSGTDYTLTISSLQPEDFATYYCQQWSSNPQYTFGQGTKLEIK

SEQ ID NO: 3213 - protein, 107 aa, Artificial Sequence
  Description of Artificial Sequence: Synthetic polypeptide
DIQLTQSPSSLSASVGDRVTITCSVSSSVSYMHWYQQKPEKAPKSLIYDTSKLASGVPSRFSGSGSGTDYTLTISSLQPEDFATYYCQQWSSNPQYTFGQGTKLEIK

SEQ ID NO: 3214 - protein, 107 aa, Artificial Sequence
  Description of Artificial Sequence: Synthetic polypeptide
DIVLTQSPDSLAVSLGERATINCSVSSSVSYMHWYQQKPGQPPKLLIYDTSKLASGVPDRFSGSGSGTDYTLTISSLQAEDVAVYYCQQWSSNPQYTFGQGTKLEIK

SEQ ID NO: 3215 - protein, 107 aa, Artificial Sequence
  Description of Artificial Sequence: Synthetic polypeptide
EIVLTQTPLSLSITPGEQASMSCSVSSSVSYMHWYLQKARPVPKLLIYDTSKLASGVPDRFSGSGSGTDYTLKISRVEAEDFGVYYCQQWSSNPQYTFGQGTKLEIK

SEQ ID NO: 3216 - protein, 107 aa, Artificial Sequence
  Description of Artificial Sequence: Synthetic polypeptide
EIVLTQTPLSLSITPGEQASISCSVSSSVSYMHWYLQKARPVPKLLIYDTSKLASGVPDRFSGSGSGTDYTLKISRVEAEDFGVYYCQQWSSNPQYTFGQGTKLEIK

SEQ ID NO: 3217 - protein, 107 aa, Artificial Sequence
  Description of Artificial Sequence: Synthetic polypeptide
DIVLTQSPLSLPVTPGEPASISCSVSSSVSYMHWYLQKPGQSPKLLIYDTSKLASGVPDRFSGSGSGTDYTLKISRVEAEDVGVYYCQQWSSNPQYTFGQGTKLEIK

SEQ ID NO: 3218 - protein, 107 aa, Artificial Sequence
  Description of Artificial Sequence: Synthetic polypeptide
DIVLTQSPLSLPVTLGQPASISCSVSSSVSYMHWYQQRPGQSPKRLIYDTSKLASGVPDRFSGSGSGTDYTLKISRVEAEDVGVYYCQQWSSNPQYTFGQGTKLEIK

SEQ ID NO: 3219 - protein, 107 aa, Artificial Sequence
  Description of Artificial Sequence: Synthetic polypeptide
DIVLTQTPLSLPVTPGEPASISCSVSSSVSYMHWYLQKPGQSPKLLIYDTSKLASGVPDRFSGSGSGTDYTLKISRVEAEDVGVYYCQQWSSNPQYTFGQGTKLEIK

SEQ ID NO: 3220 - protein, 107 aa, Artificial Sequence
  Description of Artificial Sequence: Synthetic polypeptide
DIVLTQTPLSLSVTPGQPASISCSVSSSVSYMHWYLQKPGQSPKLLIYDTSKLASGVPDRFSGSGSGTDYTLKISRVEAEDVGVYYCQQWSSNPQYTFGQGTKLEIK

SEQ ID NO: 3221 - protein, 107 aa, Artificial Sequence
  Description of Artificial Sequence: Synthetic polypeptide
DIVLTQTPLSLSVTPGQPASISCSVSSSVSYMHWYLQKPGQPPKLLIYDTSKLASGVPDRFSGSGSGTDYTLKISRVEAEDVGVYYCQQWSSNPQYTFGQGTKLEIK

SEQ ID NO: 3222 - protein, 107 aa, Artificial Sequence
  Description of Artificial Sequence: Synthetic polypeptide
DIQLIQSPSFLSASVGDRVSIICSVSSSVSYMHWYLQKPGKSPKLFIYDTSKLASGVSSRFSGRGSGTDYTLTIISLKPEDFAAYYCQQWSSNPQYTFGQGTKLEIK

SEQ ID NO: 3223 - protein, 107 aa, Artificial Sequence
  Description of Artificial Sequence: Synthetic polypeptide
DIVLTQTPLSSPVTLGQPASISCSVSSSVSYMHWYQQRPGQPPKLLIYDTSKLASGVPDRFSGSGAGTDYTLKISRVEAEDVGVYYCQQWSSNPQYTFGQGTKLEIK

SEQ ID NO: 3224 - protein, 107 aa, Artificial Sequence
  Description of Artificial Sequence: Synthetic polypeptide
EITLTQSPAFMSATPGDKVNISCSVSSSVSYMHWYQQKPGEAPKFIIYDTSKLASGIPPRFSGSGYGTDYTLTINNIESEDAAYYYCQQWSSNPQYTFGQGTKLEIK

SEQ ID NO: 3225 - protein, 117 aa, Artificial Sequence
  Description of Artificial Sequence: Synthetic polypeptide
EVQLVESGGGLVKPGGSLRLSCAVSGFTFRSYGMSWVRQAPGKGLEWVALISSGGSYTYYTDSVKGRFTISRDNSKNTLYLQMNSLKTEDTAVYYCSRHGGNFFDYWGQGTTVTVSS

SEQ ID NO: 3226 - protein, 117 aa, Artificial Sequence
  Description of Artificial Sequence: Synthetic polypeptide
EVQLVESGGALVKPGGSLRLSCAVSGFTFRSYGMSWVRQAPGKGLEWVALISSGGSYTYYTDSVKGRFTISRDNSKNTLYLQMNSLKTEDTAVYYCSRHGGNFFDYWGQGTTVTVSS

SEQ ID NO: 3227 - protein, 117 aa, Artificial Sequence
  Description of Artificial Sequence: Synthetic polypeptide
EVQLVESGGGLVQPGGSLRLSCAVSGFTFRSYGMSWVRQAPGKGLEWVALISSGGSYTYYTDSVKGRFTISRDNAKNTLYLQMNSLRAEDTAVYYCSRHGGNFFDYWGQGTTVTVSS

SEQ ID NO: 3228 - protein, 117 aa, Artificial Sequence
  Description of Artificial Sequence: Synthetic polypeptide
EVQLVESGGGLVQPGGSLRLSCAVSGFTFRSYGMSWVRQAPGKGLEWVALISSGGSYTYYTDSVKGRFTISRDNAKNSLYLQMNSLRAEDTAVYYCSRHGGNFFDYWGQGTTVTVSS

SEQ ID NO: 3229 - protein, 117 aa, Artificial Sequence
  Description of Artificial Sequence: Synthetic polypeptide
EVQLVESGGGLVQPGGSLRLSCAVSGFTFRSYGMSWVRQAPGKGLEWVALISSGGSYTYYTDSVKGRFTISRDNSKNSLYLQMNSLKTEDTAVYYCSRHGGNFFDYWGQGTTVTVSS

SEQ ID NO: 3230 - protein, 117 aa, Artificial Sequence
  Description of Artificial Sequence: Synthetic polypeptide
EVQLVESGGGLVQPGGSLRLSCAVSGFTFRSYGMSWVRQAPGKGLEWVALISSGGSYTYYTDSVKGRFTISRDNAKNSLYLQMNSLRAEDMAVYYCSRHGGNFFDYWGQGTTVTVSS

SEQ ID NO: 3231 - protein, 117 aa, Artificial Sequence
  Description of Artificial Sequence: Synthetic polypeptide
EVQLVESGGGLVQPGGSLRLSCAVSGFTFRSYGMSWVRQAPGKGLEWVALISSGGSYTYYTDSVKGQFTISRDNAKNTLYLQMNSLRAEDMAVYYCSRHGGNFFDYWGQGTTVTVSS

SEQ ID NO: 3232 - protein, 117 aa, Artificial Sequence
  Description of Artificial Sequence: Synthetic polypeptide
EVQLVESGGGLVKPGRSLRLSCTVSGFTFRSYGMSWVRQAPGKGLEWVALISSGGSYTYYTDSVKGRFTISRDNSKNILYLQMNSLKTEDTAVYYCSRHGGNFFDYWGQGTTVTVSS

SEQ ID NO: 3233 - protein, 117 aa, Artificial Sequence
  Description of Artificial Sequence: Synthetic polypeptide
EVQLVESGGGLVKPGGSLRLSCAVSGFTFRSYGMSWVRQAPGKGLEWVALISSGGSYTYYTDSVKGRFTISRDNAKNSLYLQMNSLRAEDTAVYYCSRHGGNFFDYWGQGTTVTVSS

SEQ ID NO: 3234 - protein, 117 aa, Artificial Sequence
  Description of Artificial Sequence: Synthetic polypeptide
EVQLVESGGGLVQPGGSLKLSCAVSGFTFRSYGMSWVRQASGKGLEWVALISSGGSYTYYTDSVKGRFTISRDNSKNTLYLQMNSLKTEDTAVYYCSRHGGNFFDYWGQGTTVTVSS

SEQ ID NO: 3235 - protein, 117 aa, Artificial Sequence
  Description of Artificial Sequence: Synthetic polypeptide
QVQLVESGGGVVQPGGSLRLSCAVSGFTFRSYGMSWVRQAPGKGLEWVALISSGGSYTYYTDSVKGRFTISRDNSKNTLYLQMNSLRAEDTAVYYCSRHGGNFFDYWGQGTTVTVSS

SEQ ID NO: 3236 - protein, 117 aa, Artificial Sequence
  Description of Artificial Sequence: Synthetic polypeptide
QVQLVESGGGVVQPGRSLRLSCAVSGFTFRSYGMSWVRQAPGKGLEWVALISSGGSYTYYTDSVKGRFTISRDNSKNTLYLQMSSLRAEDTAVYYCSRHGGNFFDYWGQGTTVTVSS

SEQ ID NO: 3237 - protein, 117 aa, Artificial Sequence
  Description of Artificial Sequence: Synthetic polypeptide
EVQLVESGGGLVQPGGSLRLSCPVSGFTFRSYGMSWVRQAPGKGLEWVALISSGGSYTYYTDSVKGRFTISRDNANNSLYLQMNSLRAEDTAVYYCSRHGGNFFDYWGQGTTVTVSS

SEQ ID NO: 3238 - protein, 117 aa, Artificial Sequence
  Description of Artificial Sequence: Synthetic polypeptide
EVQLVESGGGLVQPGRSLRLSCTVSGFTFRSYGMSWVRQAPGKGLEWVALISSGGSYTYYTDSVKGRFTISRDNSKNILYLQMNSLKTEDTAVYYCSRHGGNFFDYWGQGTTVTVSS

SEQ ID NO: 3239 - protein, 117 aa, Artificial Sequence
  Description of Artificial Sequence: Synthetic polypeptide
EVQLVESGGGLVQPGPSLRLSCTVSGFTFRSYGMSWVRQAPGKGLEWVALISSGGSYTYYTDSVKGRFTISRDNSKNILYLQMNSLKTEDTAVYYCSRHGGNFFDYWGQGTTVTVSS

SEQ ID NO: 3240 - protein, 117 aa, Artificial Sequence
  Description of Artificial Sequence: Synthetic polypeptide
EVQLVESGGGLVQPGGSLRLSCAVSGFTFRSYGMSWVRQAPGKGLEWVALISSGGSYTYYTDSVKGRFTISRDNSKNTLYLQMNSLRAEDTAVYYCSRHGGNFFDYWGQGTTVTVSS

SEQ ID NO: 3241 - protein, 117 aa, Artificial Sequence
  Description of Artificial Sequence: Synthetic polypeptide
EVQLVESGGGLVQPGGSLRLSCAVSGFTFRSYGMSWVRQAPGKGLEWVALISSGGSYTYYTDSVKGRFTISRDNAKNSLYLQMNSLRDEDTAVYYCSRHGGNFFDYWGQGTTVTVSS

SEQ ID NO: 3242 - protein, 117 aa, Artificial Sequence
  Description of Artificial Sequence: Synthetic polypeptide
QVQLVESGGGLVKPGGSLRLSCAVSGFTFRSYGMSWVRQAPGKGLEWVALISSGGSYTYYTDSVKGRFTISRDNAKNSLYLQMNSLRAEDTAVYYCSRHGGNFFDYWGQGTTVTVSS

SEQ ID NO: 3243 - protein, 117 aa, Artificial Sequence
  Description of Artificial Sequence: Synthetic polypeptide
QVQLVESGGGVVQPGRSLRLSCAVSGFTFRSYGMSWVRQAPGKGLEWVALISSGGSYTYYTDSVKGRFTISRDNSKNTLYLQMNSLRAEDTAVYYCSRHGGNFFDYWGQGTTVTVSS

SEQ ID NO: 3244 - protein, 117 aa, Artificial Sequence
  Description of Artificial Sequence: Synthetic polypeptide
EVQLLESGGGLVQPGGSLRLSCAVSGFTFRSYGMSWVRQAPGKGLEWVALISSGGSYTYYTDSVKGRFTISRDNSKNTLYLQMNSLRAEDTAVYYCSRHGGNFFDYWGQGTTVTVSS

SEQ ID NO: 3245 - protein, 117 aa, Artificial Sequence
  Description of Artificial Sequence: Synthetic polypeptide
EVQLVESGGGLVQPGGSLRLSCAVSGFTFRSYGMSWVRQAPGKGLEWVALISSGGSYTYYTDSVKGRFTISRHNSKNTLYLQMNSLRAEDTAVYYCSRHGGNFFDYWGQGTTVTVSS

SEQ ID NO: 3246 - protein, 117 aa, Artificial Sequence
  Description of Artificial Sequence: Synthetic polypeptide
EVQLVESGGGLIQPGGSLRLSCAVSGFTFRSYGMSWVRQPPGKGLEWVALISSGGSYTYYTDSVKGRFTISRDNSKNTLYLQMNSLRAEDTAVYYCSRHGGNFFDYWGQGTTVTVSS

SEQ ID NO: 3247 - protein, 117 aa, Artificial Sequence
  Description of Artificial Sequence: Synthetic polypeptide
EVQLVESGGGLIQPGGSLRLSCAVSGFTFRSYGMSWVRQAPGKGLEWVALISSGGSYTYYTDSVKGRFTISRDNSKNTLYLQMNSLRAEDTAVYYCSRHGGNFFDYWGQGTTVTVSS

SEQ ID NO: 3248 - protein, 117 aa, Artificial Sequence
  Description of Artificial Sequence: Synthetic polypeptide
EVQLVESGGGLVQPGRSLRLSCAVSGFTFRSYGMSWVRQAPGKGLEWVALISSGGSYTYYTDSVKGRFTISRDNAKNSLYLQMNSLRAEDTALYYCSRHGGNFFDYWGQGTTVTVSS

SEQ ID NO: 3249 - protein, 117 aa, Artificial Sequence
  Description of Artificial Sequence: Synthetic polypeptide
QVQLVESGGGVVQPGRSLRLSCAVSGFTFRSYGMSWVRQAPGKGLEWVALISSGGSYTYYTDSVKGRFTISRDNSKNRLYLQMNSLRAEDTAVYYCSRHGGNFFDYWGQGTTVTVSS

SEQ ID NO: 3250 - protein, 117 aa, Artificial Sequence
  Description of Artificial Sequence: Synthetic polypeptide
QVQLVESGGGVVQPGRSLRLSCAVSGFTFRSYGMSWVRQAPGKGLEWVALISSGGSYTYYTDSVKGRFTISRDNSKNTLYLQMNSLRAEGTAVYYCSRHGGNFFDYWGQGTTVTVSS

SEQ ID NO: 3251 - protein, 117 aa, Artificial Sequence
  Description of Artificial Sequence: Synthetic polypeptide
QVQLVESGGGVVQPGRSLRLSCAVSGFTFRSYGMSWVRQAPGKGLEWVALISSGGSYTYYTDSVKGRFAISRDNSKNTLYLQMNSLRAEDTAVYYCSRHGGNFFDYWGQGTTVTVSS

SEQ ID NO: 3252 - protein, 117 aa, Artificial Sequence
  Description of Artificial Sequence: Synthetic polypeptide
QVQLVDSGGGVVQPGRSLRLSCAVSGFTFRSYGMSWVRQAPGKGLEWVALISSGGSYTYYTDSVKGRFTISRDNSKNTLYLQMNSLRAEDTAVYYCSRHGGNFFDYWGQGTTVTVSS

SEQ ID NO: 3253 - protein, 117 aa, Artificial Sequence
  Description of Artificial Sequence: Synthetic polypeptide
EVQLVESGGGVVRPGGSLRLSCAVSGFTFRSYGMSWVRQAPGKGLEWVALISSGGSYTYYTDSVKGRFTISRDNAKNSLYLQMNSLRAEDTALYHCSRHGGNFFDYWGQGTTVTVSS

SEQ ID NO: 3254 - protein, 117 aa, Artificial Sequence
  Description of Artificial Sequence: Synthetic polypeptide
EVQLVESGGVVVQPGGSLRLSCAVSGFTFRSYGMSWVRQAPGKGLEWVALISSGGSYTYYTDSVKGRFTISRDNSKNSLYLQMNSLRAEDTALYYCSRHGGNFFDYWGQGTTVTVSS

SEQ ID NO: 3255 - protein, 117 aa, Artificial Sequence
  Description of Artificial Sequence: Synthetic polypeptide
EVQLVESGGGVVQPGGSLRLSCAVSGFTFRSYGMSWVRQAPGKGLEWVALISSGGSYTYYTDSVKGRFTISRDNSKNSLYLQMNSLRTEDTALYYCSRHGGNFFDYWGQGTTVTVSS

SEQ ID NO: 3256 - protein, 117 aa, Artificial Sequence
  Description of Artificial Sequence: Synthetic polypeptide
EVQLVESGGVVVQPGGSLRLSCAVSGFTFRSYGMSWVRQAPGKGLEWVALISSGGSYTYYTDSVKGRFTISRDNSKNSLYLQMNSLRTEDTALYYCSRHGGNFFDYWGQGTTVTVSS

SEQ ID NO: 3257 - protein, 117 aa, Artificial Sequence
  Description of Artificial Sequence: Synthetic polypeptide
EVQLVETGGGLIQPGGSLRLSCAVSGFTFRSYGMSWVRQAPGKGLEWVALISSGGSYTYYTDSVKGRFTISRDNSKNTLYLQMNSLRAEDTAVYYCSRHGGNFFDYWGQGTTVTVSS

SEQ ID NO: 3258 - protein, 117 aa, Artificial Sequence
  Description of Artificial Sequence: Synthetic polypeptide
EVQLVESGGGLVQPGGSLRLSCAVSGFTFRSYGMSWVRQATGKGLEWVALISSGGSYTYYTDSVKGRFTISRENAKNSLYLQMNSLRAGDTAVYYCSRHGGNFFDYWGQGTTVTVSS

SEQ ID NO: 3259 - protein, 117 aa, Artificial Sequence
  Description of Artificial Sequence: Synthetic polypeptide
EVQLVESRGVLVQPGGSLRLSCAVSGFTFRSYGMSWVRQAPGKGLEWVALISSGGSYTYYTDSVKGRFTISRDNSKNTLHLQMNSLRAEDTAVYYCSRHGGNFFDYWGQGTTVTVSS

SEQ ID NO: 3260 - protein, 117 aa, Artificial Sequence
  Description of Artificial Sequence: Synthetic polypeptide
EVQLVESGGGLVQPGRSLRLSCAVSGFTFRSYGMSWVRQAPGKGLEWVALISSGGSYTYYTDSVKGRFTISRDNAKNSLYLQMNSLRAEDMALYYCSRHGGNFFDYWGQGTTVTVSS

SEQ ID NO: 3261 - protein, 117 aa, Artificial Sequence
  Description of Artificial Sequence: Synthetic polypeptide
QVQLVESGGGLVQPGGSLRLSCSVSGFTFRSYGMSWVRQAPGKGLEWVALISSGGSYTYYTDSVKGRFTISRDNSKNTLYLQMNSLRAEDTAVYYCSRHGGNFFDYWGQGTTVTVSS

SEQ ID NO: 3262 - protein, 117 aa, Artificial Sequence
  Description of Artificial Sequence: Synthetic polypeptide
EVQLVESGGGLVQPGGSLRLSCSVSGFTFRSYGMSWVRQAPGKGLEWVALISSGGSYTYYTDSVKGRFTISRDNSKNTLYLQMSSLRAEDTAVYYCSRHGGNFFDYWGQGTTVTVSS

SEQ ID NO: 3263 - protein, 117 aa, Artificial Sequence
  Description of Artificial Sequence: Synthetic polypeptide
QVQLVESGGGVVQPGRSLRLSCAVSGFTFRSYGMSWVRQAPGKGLEWVALISSGGSYTYYTDSVKGRFTISRDNSTNTLFLQMNSLRAEDTAVYYCSRHGGNFFDYWGQGTTVTVSS

SEQ ID NO: 3264 - protein, 117 aa, Artificial Sequence
  Description of Artificial Sequence: Synthetic polypeptide
QVQLLESGGGLVKPGGSLRLSCAVSGFTFRSYGMSWVRQAPGKGLEWVALISSGGSYTYYTDSVKGRFTISRDNAKNSLYLQMNSLRAEDTAVYYCSRHGGNFFDYWGQGTTVTVSS

SEQ ID NO: 3265 - protein, 117 aa, Artificial Sequence
  Description of Artificial Sequence: Synthetic polypeptide
EVQLVESGEGLVQPGGSLRLSCAVSGFTFRSYGMSWVRQAPGKGLEWVALISSGGSYTYYTDSVKGRFTISRDNSKNTLYLQMGSLRAEDMAVYYCSRHGGNFFDYWGQGTTVTVSS

SEQ ID NO: 3266 - protein, 117 aa, Artificial Sequence
  Description of Artificial Sequence: Synthetic polypeptide
EVQLVESGGGLVQPGGSLRLSCAVSGFTFRSYGMSWVRQAPGKGLEWVALISSGGSYTYYTDSVKGRFTISRDNSKNTLYLQMGSLRAEDMAVYYCSRHGGNFFDYWGQGTTVTVSS

SEQ ID NO: 3267 - protein, 117 aa, Artificial Sequence
  Description of Artificial Sequence: Synthetic polypeptide
EVQLVESGGGLVQPGGSLRLSCSVSGFTFRSYGMSWVRQAPGKGLEWVALISSGGSYTYYTDSVKGRFTISRDNSKNTLYVQMSSLRAEDTAVYYCSRHGGNFFDYWGQGTTVTVSS

SEQ ID NO: 3268 - protein, 117 aa, Artificial Sequence
  Description of Artificial Sequence: Synthetic polypeptide
EVQLVESGGGLVQPGGSLRLSCAVSGFTFRSYGMSWVRQAPGKGLEWVALISSGGSYTYYTDSVKGRFIISRDNSRNSLYLQKNRRRAEDMAVYYCSRHGGNFFDYWGQGTTVTVSS

SEQ ID NO: 3269 - protein, 117 aa, Artificial Sequence
  Description of Artificial Sequence: Synthetic polypeptide
EVQLVESGGGLVQPGGSLRLSCAVSGFTFRSYGMSWVHQAPGKGLEWVALISSGGSYTYYTDSVKGRFIISRDNSRNTLYLQTNSLRAEDTAVYYCSRHGGNFFDYWGQGTTVTVSS

SEQ ID NO: 3270 - protein, 117 aa, Artificial Sequence
  Description of Artificial Sequence: Synthetic polypeptide
EVHLVESGGGLVQPGGALRLSCAVSGFTFRSYGMSWVRQATGKGLEWVALISSGGSYTYYTDSVKGRFTISRENAKNSLYLQMNSLRAGDTAVYYCSRHGGNFFDYWGQGTTVTVSS

SEQ ID NO: 3271 - protein, 117 aa, Artificial Sequence
  Description of Artificial Sequence: Synthetic polypeptide
EVQLVESGGGLVQPRGSLRLSCAVSGFTFRSYGMSWVRQAPGKGLEWVALISSGGSYTYYTDSVKGRFTISRDNSKNTLYLQMNNLRAEGTAVYYCSRHGGNFFDYWGQGTTVTVSS

SEQ ID NO: 3272 - protein, 117 aa, Artificial Sequence
  Description of Artificial Sequence: Synthetic polypeptide
EVQLVESGGGLVQPRGSLRLSCAVSGFTFRSYGMSWVRQAPGKGLEWVALISSGGSYTYYTDSVKGRFTISRDNSKNTLYLQMNNLRAEGTAAYYCSRHGGNFFDYWGQGTTVTVSS

SEQ ID NO: 3273 - protein, 117 aa, Artificial Sequence
  Description of Artificial Sequence: Synthetic polypeptide
QVQLVQSGAEVKKPGASVKVSCKVSGFTFRSYGMSWVRQAPGKGLEWVALISSGGSYTYYTDSVKGRFTITRDNSTNTLYMELSSLRSEDTAVYYCSRHGGNFFDYWGQGTTVTVSS

SEQ ID NO: 3274 - protein, 117 aa, Artificial Sequence
  Description of Artificial Sequence: Synthetic polypeptide
QVQLVQSGSELKKPGASVKVSCKVSGFTFRSYGMSWVRQAPGQGLEWVALISSGGSYTYYTDSVKGRFVISRDNSVNTLYLQISSLKAEDTAVYYCSRHGGNFFDYWGQGTTVTVSS

SEQ ID NO: 3275 - protein, 470 aa, Artificial Sequence
  Description of Artificial Sequence: Synthetic polypeptide
METDTLLLWVLLLWVPGSTGQVQLVESGGGVVQPGRSLRLSCAASGIDFSRYWMSWVRQAPGKGLEWVGEINPDSSTINYAPSLKDRFTISRDNSKNTLYLQMSSLRAEDTAVYYCASLYYDYGDAMDYWGQGTTVTVSSASTKGPSVFPLAPSSKSTSGGTAALGCLVKDYFPEPVTVSWNSGALTSGVHTFPAVLQSSGLYSLSSVVTVPSSSLGTQTYICNVNHKPSNTKVDKRVEPKSCDKTHTCPPCPAPELLGGPSVFLFPPKPKDTLMISRTPEVTCVVVDVSHEDPEVKFNWYVDGVEVHNAKTKPREEQYNATYRVVSVLTVLHQDWLNGKEYKCKVSNKALPAPIEKTISKAKGQPREPQVYTLPPCREEMTKNQVSLWCLVKGFYPSDIAVEWESNGQPENNYKTTPPVLDSDGSFFLYSKLTVDKSRWQQGNVFSCSVMHEALHNHYTQKSLSLSPGK

SEQ ID NO: 3276 - protein, 503 aa, Artificial Sequence
  Description of Artificial Sequence: Synthetic polypeptide
METDTLLLWVLLLWVPGSTGQVQLVQSGAEVKKPGSSVKVSCKASGYSFTTYYIHWVRQAPGQGLEWMGWFFPGSGNIKYNEKFKGRVTITADTSTSTAYMELSSLRSEDTAVYYCAGSYYSYDVLDYWGQGTTVTVSSGGGGSGGGGSGGGGSGGGGSDIQMTQSPSFLSASVGDRVTITCKASQNVGINVVWHQQKPGKAPKALIYSSSHRYSGVPSRFSGSGSGTEFTLTISSLQPEDFATYFCQQFKSYPLTFGQGTKLEIKGGGGSGGGGSDKTHTCPPCPAPELLGGPSVFLFPPKPKDTLMISRTPEVTCVVVDVSHEDPEVKFNWYVDGVEVHNAKTKPREEQYASTYRVVSVLTVLHQDWLNGKEYKCKVSNKALPAPIEKTISKAKGQPREPQVCTLPPSREEMTKNQVSLSCAVKGFYPSDIAVEWESNGQPENNYKTTPPVLDSDGSFFLVSKLTVDKSRWQQGNVFSCSVMHEALHNHYTQKSLSLSPGK

SEQ ID NO: 3277 - protein, 234 aa, Artificial Sequence; identical to SEQ ID NO: 1007
  Description of Artificial Sequence: Synthetic polypeptide

SEQ ID NO: 3278 - protein, 469 aa, Artificial Sequence
  Description of Artificial Sequence: Synthetic polypeptide
METDTLLLWVLLLWVPGSTGQVQLVQSGAEVKKPGSSVKVSCKASGYSFTTYYIHWVRQAPGQGLEWMGWFFPGSGNIKYNEKFKGRVTITADTSTSTAYMELSSLRSEDTAVYYCAGSYYSYDVLDYWGQGTTVTVSSASTKGPSVFPLAPSSKSTSGGTAALGCLVKDYFPEPVTVSWNSGALTSGVHTFPAVLQSSGLYSLSSVVTVPSSSLGTQTYICNVNHKPSNTKVDKRVEPKSCDKTHTCPPCPAPELLGGPSVFLFPPKPKDTLMISRTPEVTCVVVDVSHEDPEVKFNWYVDGVEVHNAKTKPREEQYNSTYRVVSVLTVLHQDWLNGKEYKCKVSNKALPAPIEKTISKAKGQPREPQVYTLPPSREEMTKNQVSLTCLVKGFYPSDIAVEWESNGQPENNYKTTPPVLDSDGSFFLYSKLTVDKSRWQQGNVFSCSVMHEALHNHYTQKSLSLSPGK

SEQ ID NO: 3279 - protein, 234 aa, Artificial Sequence
  Description of Artificial Sequence: Synthetic polypeptide
METDTLLLWVLLLWVPGSTGDIQMTQSPSSLSASVGDRVTITCKASQNVGINVVWHQQKPGKVPKALIYSSSHRYSGVPSRFSGSGSGTDFTLTISSLQPEDVATYFCQQFKSYPLTFGQGTKLEIKRTVAAPSVFIFPPSDEQLKSGTASVVCLLNNFYPREAKVQWKVDNALQSGNSQESVTEQDSKDSTYSLSSTLTLSKADYEKHKVYACEVTHQGLSSPVTKSFNRGEC

SEQ ID NO: 3280 - protein, 247 aa, Artificial Sequence
  Description of Artificial Sequence: Synthetic polypeptide
METDTLLLWVLLLWVPGSTGDKTHTCPPCPAPELLGGPSVFLFPPKPKDTLMISRTPEVTCVVVDVSHEDPEVKFNWYVDGVEVHNAKTKPREEQYNSTYRVVSVLTVLHQDWLNGKEYKCKVSNKALPAPIEKTISKAKGQPREPQVYTLPPCREEMTKNQVSLWCLVKGFYPSDIAVEWESNGQPENNYKTTPPVLDSDGSFFLYSKLTVDKSRWQQGNVFSCSVMHEALHNRFTQKSLSLSPGK

SEQ ID NO: 3281 - protein, 520 aa, Artificial Sequence
  Description of Artificial Sequence: Synthetic polypeptide
METDTLLLWVLLLWVPGSTGEVQLVESGGGLVQPGGSLRLSCAASGFTFSNFGMHWVRQAPGKGLEWVSYISSGSSTIYYADTLKGRFTISRDNSKNTLYLQMNSLRAEDTAVYYCARRGEGAMDYWGQGTTVTVSSGGGGSGGGGSGGGGSGGGGSDNQLTQSPSFLSASVGDRVTITCRASSSVNYIYWYQQKPGKAPKLLIYYTSNLAPGVPSRFSGSGSGNEYTLTISSLQPEDFATYYCQQFTSSPFTFGQGTKLEIKGGGGSDKTHTCPPCPAPELLGGPSVFLFPPKPKDTLMISRTPEVTCVVVDVSHEDPEVKFNWYVDGVEVHNAKTKPREEQYNSTYRVVSVLTVLHQDWLNGKEYKCKVSNKALPAPIEKTISKAKGQPREPQVCTLPPSREEMTKNQVSLSCAVKGFYPSDIAVEWESNGQPENNYKTTPPVLDSDGSFFLVSKLTVDKSRWQQGNVFSCSVMHEALHNHYTQKSLSLSPGKGGGGSGGGGSGLNDIFEAQKIEWHE

SEQ ID NO: 3282 - protein, 284 aa, Artificial Sequence
  Description of Artificial Sequence: Synthetic polypeptide
METDTLLLWVLLLWVPGSTGGLNDIFEAQKIEWHEGGGGSEPRTDTDTCPNPPDPCPTCPTPDLLGGPSVFIFPPKPKDVLMISLTPKITCVVVDVSEEEPDVQFNWYVNNVEDKTAQTETRQRQYNSTYRVVSVLPIKHQDWMSGKVFKCKVNNNALPSPIEKTISKPRGQVRVPQIYTFPPPIEQTVKKDVSVTCLVTGFLPQDIHVEWESNGQPQPEQNYKNTQPVLDSDGSYFLYSKLNVPKSRWDQGDSFTCSVIHEALHNHHMTKTISRSLGNGGGGS

SEQ ID NO: 3283 - protein, 272 aa, Artificial Sequence
  Description of Artificial Sequence: Synthetic polypeptide
METDTLLLWVLLLWVPGSTGDKTHTCPPCPAPELLGGPSVFLFPPKPKDTLMISRTPEVTCVVVDVSHEDPEVKFNWYVDGVEVHNAKTKPREEQYNSTYRVVSVLTVLHQDWLNGKEYKCKVSNKALPAPIEKTISKAKGQPREPQVYTLPPSREEMTKNQVSLTCLVKGFYPSDIAVEWESNGQPENNYKTTPPVLDSDGSFFLYSKLTVDKSRWQQGNVFSCSVMHEALHNHYTQKSLSLSPGKGGGGSGGGGSGLNDIFEAQKIEWHE

SEQ ID NO: 3284 - protein, 469 aa, Artificial Sequence
  Description of Artificial Sequence: Synthetic polypeptide
METDTLLLWVLLLWVPGSTGQVQLQQSGPELVKPGASVKISCKASGYAFSSSWMNWVKQRPGQGLEWIGRIYPGDGDTKYNGKFKGKATLTADKSSSTAYMHLSSLTSVDSAVYFCARRGTGGWYFDVWGAGTTVTVSSAKTTAPSVYPLAPVCGDTTGSSVTLGCLVKGYFPEPVTLTWNSGSLSSGVHTFPAVLQSDLYTLSSSVTVTSSTWPSQSITCNVAHPASSTKVDKKIEPRGPTIKPCPPCKCPAPNLLGGPSVFIFPPKIKDVLMISLSPIVTCVVVDVSEDDPDVQISWFVNNVEVHTAQTQTHREDYNSTLRVVSALPIQHQDWMSGKEFKCKVNNKDLPAPIERTISKPKGSVRAPQVYVLPPPEEEMTKKQVTLTCMVTDFMPEDIYVEWTNNGKTELNYKNTEPVLDSDGSYFMYSKLRVEKKNWVERNSYSCSVVHEGLHNHHTTKSFSRTPGK

SEQ ID NO: 3285 - protein, 238 aa, Artificial Sequence
  Description of Artificial Sequence: Synthetic polypeptide
METDTLLLWVLLLWVPGSTGDIVLTQSPASLAVSLGQRATISCRASESVDSSGNSFMHWYQQKPGQPPQLLIYRASNLESGIPARFSGSGSRTDFTLTINPVEADDVATFYCQQSFDDPFTFGSGTKLEIKRADAAPTVSIFPPSSEQLTSGGASVVCFLNNFYPKDINVKWKIDGSERQNGVLNSWTDQDSKDSTYSMSSTLTLTKDEYERHNSYTCEATHKTSTSPIVKSFNRNEC

SEQ ID NO: 3286 - protein, 739 aa, Artificial Sequence
  Description of Artificial Sequence: Synthetic polypeptide
METDTLLLWVLLLWVPGSTGQVQLVESGGGVVQPGRSLRLSCAASGIDFSRYWMSWVRQAPGKGLEWVGEINPDSSTINYAPSLKDRFTISRDNSKNTLYLQMSSLRAEDTAVYYCASLYYDYGDAMDYWGQGTTVTVSSASTKGPSVFPLAPSSKSTSGGTAALGCLVKDYFPEPVTVSWNSGALTSGVHTFPAVLQSSGLYSLSSVVTVPSSSLGTQTYICNVNHKPSNTKVDKRVEPKSCDKTHTCPPCPAPELLGGPSVFLFPPKPKDTLMISRTPEVTCVVVDVSHEDPEVKFNWYVDGVEVHNAKTKPREEQYNSTYRVVSVLTVLHQDWLNGKEYKCKVSNKALPAPIEKTISKAKGQPREPQVYTLPPCREEMTKNQVSLWCLVKGFYPSDIAVEWESNGQPENNYKTTPPVLDSDGSFFLYSKLTVDKSRWQQGNVFSCSVMHEALHNHYTQKSLSLSPGKGGGGSGGGGSGGGGSEVQLVESGGGLVQPGGSLRLSCAASGFTFSTYAMNWVRQAPGKGLEWVSRIRSKYNNYATYYADSVKDRFTISRDDSKNTLYLQMNSLKTEDTAVYYCVRHGNFGNSYVSWFAYWGQGTLVTVSSGGGGSGGGGSGGGGSGGGGSQAVVTQEPSLTVSPGGTVTLTCRSSTGAVTTSNYANWVQQKPGQAPRGLIGGTNKRAPWTPARFSGSLLGGKAALTLSGAQPEDEAEYYCALWYSNLWVFGGGTKLTVL

SEQ ID NO: 3287 - protein, 247 aa, Artificial Sequence
  Description of Artificial Sequence: Synthetic polypeptide
METDTLLLWVLLLWVPGSTGDKTHTCPPCPAPELLGGPSVFLFPPKPKDTLMISRTPEVTCVVVDVSHEDPEVKFNWYVDGVEVHNAKTKPREEQYNSTYRVVSVLTVLHQDWLNGKEYKCKVSNKALPAPIEKTISKAKGQPREPQVCTLPPSREEMTKNQVSLSCAVKGFYPSDIAVEWESNGQPENNYKTTPPVLDSDGSFFLVSKLTVDKSRWQQGNVFSCSVMHEALHNHYTQKSLSLSPGK

SEQ ID NO: 3288 - protein, 20 aa, Artificial Sequence
  Description of Artificial Sequence: Synthetic peptide
METDTLLLWVLLLWVPGSTG

SEQ ID NO: 3289 - protein, 107 aa, Artificial Sequence; identical to SEQ ID NO: 230
  Description of Artificial Sequence: Synthetic polypeptide
  MOD_RES (30)..(30): G, E, A, or D
  MOD_RES (31)..(31): N or D
  MOD_RES (32)..(32): R or K
  MOD_RES (36)..(36): Y or H
  MOD_RES (56)..(56): K or S

SEQ ID NO: 3290 - protein, 119 aa, Artificial Sequence; identical to SEQ ID NO: 231
  Description of Artificial Sequence: Synthetic polypeptide
  MOD_RES (27)..(27): H, T, G, or Y
  MOD_RES (28)..(28): D, T, or S
  MOD_RES (30)..(30): H, R, D, K, or T
  MOD_RES (31)..(31): L, D, K, T, or N
  MOD_RES (32)..(32): W, F, T, I, Y, or G
  MOD_RES (50)..(50): R or W
  MOD_RES (51)..(51): V, I, or F
  MOD_RES (52)..(52): F, S, or Y
  MOD_RES (53)..(53): A or P
  MOD_RES (57)..(57): N or S
  MOD_RES (58)..(58): T, V, Y, or I
  MOD_RES (59)..(59): K or R
  MOD_RES (98)..(98): G or V
  MOD_RES (100)..(100): Y or I
  MOD_RES (103)..(103): Y or A
  MOD_RES (104)..(104): D or G

SEQ ID NO: 3291 - protein, 238 aa, Unknown
  Description of Unknown: B7-6 sequence
DLKVEMMAGGTQITPLNDNVTIFCNIFYSQPLNITSMGITWFWKSLTFDKEVKVFEFFGDHQEAFRPGAIVSPWRLKSGDASLRLPGIQLEEAGEYRCEVVVTPLKAQGTVQLEVVASPASRLLLDQVGMKENEDKYMCESSGFYPEAINITWEKQTQKFPHPIEISEDVITGPTIKNMDGTFNVTSCLKLNSSQEDPGTVYQCVVRHASLHTPLRSNFTLTAARHSLSETEKTDNFS

SEQ ID NO: 3292 - protein, 284 aa, Unknown
  Description of Unknown: MICA sequence
EPHSLRYNLTVLSWDGSVQSGFLTEVHLDGQPFLRCDRQKCRAKPQGQWAEDVLGNKTWDRETRDLTGNGKDLRMTLAHIKDQKEGLHSLQEIRVCEIHEDNSTRSSQHFYYDGELFLSQNLETKEWTMPQSSRAQTLAMNVRNFLKEDAMKTKTHYHAMHADCLQELRRYLKSGVVLRRTVPPMVNVTRSEASEGNITVTCRASGFYPWNITLSWRQDGVSLSHDTQQWGDVLPDGNGTYQTWVATRICQGEEQRFTCYMEHSGNHSTHPVPSGKVLVLQSHW

SEQ ID NO: 3293 - protein, 287 aa, Unknown
  Description of Unknown: MICB sequence
AEPHSLRYNLMVLSQDESVQSGFLAEGHLDGQPFLRYDRQKRRAKPQGQWAEDVLGAKTWDTETEDLTENGQDLRRTLTHIKDQKGGLHSLQEIRVCEIHEDSSTRGSRHFYYDGELFLSQNLETQESTVPQSSRAQTLAMNVTNFWKEDAMKTKTHYRAMQADCLQKLQRYLKSGVAIRRTVPPMVNVTCSEVSEGNITVTCRASSFYPRNITLTWRQDGVSLSHNTQQWGDVLPDGNGTYQTWVATRIRQGEEQRFTCYMEHSGNHGTHPVPSGKVLVLQSQRTD

SEQ ID NO: 3294 - protein, 191 aa, Unknown
  Description of Unknown: ULBP1 sequence
GWVDTHCLCYDFIITPKSRPEPQWCEVQGLVDERPFLHYDCVNHKAKAFASLGKKVNVTKTWEEQTETLRDVVDFLKGQLLDIQVENLIPIEPLTLQARMSCEHEAHGHGRGSWQFLFNGQKFLLFDSNNRKWTALHPGAKKMTEKWEKNRDVTMFFQKISLGDCKMWLEEFLMYWEQMLDPTKPPSLAPG

SEQ ID NO: 3295 - protein, 329 aa, Unknown
  Description of Unknown: NECTIN2 sequence
QDVRVQVLPEVRGQLGGTVELPCHLLPPVPGLYISLVTWQRPDAPANHQNVAAFHPKMGPSFPSPKPGSERLSFVSAKQSTGQDTEAELQDATLALHGLTVEDEGNYTCEFATFPKGSVRGMTWLRVIAKPKNQAEAQKVTFSQDPTTVALCISKEGRPPARISWLSSLDWEAKETQVSGTLAGTVTVTSRFTLVPSGRADGVTVTCKVEHESFEEPALIPVTLSVRYPPEVSISGYDDNWYLGRTDATLSCDVRSNPEPTGYDWSTTSGTFPTSAVAQGSQLVIHAVDSLFNTTFVCTVTNAVGMGRAEQVIFVRETPNTAGAGATGG

SEQ ID NO: 3296 - protein, 323 aa, Unknown
  Description of Unknown: NECL5 sequence
WPPPGTGDVVVQAPTQVPGFLGDSVTLPCYLQVPNMEVTHVSQLTWARHGESGSMAVFHQTQGPSYSESKRLEFVAARLGAELRNASLRMFGLRVEDEGNYTCLFVTFPQGSRSVDIWLRVLAKPQNTAEVQKVQLTGEPVPMARCVSTGGRPPAQITWHSDLGGMPNTSQVPGFLSGTVTVTSLWILVPSSQVDGKNVTCKVEHESFEKPQLLTVNLTVYYPPEVSISGYDNNWYLGQNEATLTCDARSNPEPTGYNWSTTMGPLPPFAVAQGAQLLIRPVDKPINTTLICNVTNALGARQAELTVQVKEGPPSEHSGISRN

SEQ ID NO: 3297 - protein, 330 aa, Unknown
  Description of Unknown: NECL2 sequence
QNLFTKDVTVIEGEVATISCQVNKSDDSVIQLLNPNRQTIYFRDFRPLKDSRFQLLNFSSSELKVSLTNVSISDEGRYFCQLYTDPPQESYTTITVLVPPRNLMIDIQKDTAVEGEEIEVNCTAMASKPATTIRWFKGNTELKGKSEVEEWSDMYTVTSQLMLKVHKEDDGVPVICQVEHPAVTGNLQTQRYLEVQYKPQVHIQMTYPLQGLTREGDALELTCEAIGKPQPVMVTWVRVDDEMPQHAVLSGPNLFINNLNKTDNGTYRCEASNIVGKAHSDYMLYVYDPPTTIPPPTTTTTTTTTTTTTILTIITDSRAGEEGSIRAVDH

SEQ ID NO: 3298 - protein, 155 aa, Unknown
  Description of Unknown: CD70 sequence
QRFAQAQQQLPLESLGWDVAELQLNHTGPQQDPRLYWQGGPALGRSFLHGPELDKGQLRIHRDGIYMVHIQVTLAICSSTTASRHHPTTLAVGICSPASRSISLLRLSFHQGCTIASQRLTPLARGDTLCTNLTGTLLPSRNTDETFFGVQWVRP

SEQ ID NO: 3299 - protein, 294 aa, Unknown
  Description of Unknown: L-selectin sequence
WTYHYSEKPMNWQRARRFCRDNYTDLVAIQNKAEIEYLEKTLPFSRSYYWIGIRKIGGIWTWVGTNKSLTEEAENWGDGEPNNKKNKEDCVEIYIKRNKDAGKWNDDACHKLKAALCYTASCQPWSCSGHGECVEIINNYTCNCDVGYYGPQCQFVIQCEPLEAPELGTMDCTHPLGNFSFSSQCAFSCSEGTNLTGIEETTCGPFGNWSSPEPTCQVIQCEPLSAPDLGIMNCSHPLASFSFTSACTFICSEGTELIGKKKTICESSGIWSNPSPICQKLDKSFSMIKEGDYN

SEQ ID NO: 3300 - protein, 243 aa, Unknown
  Description of Unknown: CD72 sequence
RYLQVSQQLQQTNRVLEVTNSSLRQQLRLKITQLGQSAEDLQGSRRELAQSQEALQVEQRAHQAAEGQLQACQADRQKTKETLQSEEQQRRALEQKLSNMENRLKPFFTCGSADTCCPSGWIMHQKSCFYISLTSKNWQESQKQCETLSSKLATFSEIYPQSHSYYFLNSLLPNGGSGNSYWTGLSSNKDWKLTDDTQRTRTYAQSSKCNKVHKTWSWWTLESESCRSSLPYICEMTAFRFPD

SEQ ID NO: 3301 - protein, 124 aa, Unknown
  Description of Unknown: CLEC2B (AICL) sequence
KLTRDSQSLCPYDWIGFQNKCYYFSKEEGDWNSSKYNCSTQHADLTIIDNIEEMNFLRRYKCSSDHWIGLKMAKNRTGQWVDGATFTKSFGMRGSEGCAYLSDDGAATARCYTERKWICRKRIH

SEQ ID NO: 3302 - protein, 194 aa, Unknown
  Description of Unknown: CD48 sequence
QGHLVHMTVVSGSNVTLNISESLPENYKQLTWFYTFDQKIVEWDSRKSKYFESKFKGRVRLDPQSGALYISKVQKEDNSTYIMRVLKKTGNEQEWKIKLQVLDPVPKPVIKIEKIEDMDDNCYLKLSCVIPGESVNYTWYGDKRPFPKELQNSVLETTLMPHNYSRCYTCQVSNSVSSKNGTVCLSPPCTLARS

SEQ ID NO: 3303 - protein, 133 aa, Unknown
  Description of Unknown: OX40L sequence
QVSHRYPRIQSIKVQFTEYKKEKGFILTSQKEDEIMKVQNNSVIINCDGFYLISLKGYFSQEVNISLHYQKDEEPLFQLKKVRSVNSLMVASLTYKDKVYLNVTTDNTSLDDFHVNGGELILIHQNPGEFCVL

SEQ ID NO: 3304 - protein, 149 aa, Unknown
  Description of Unknown: CD40L sequence
MQKGDQNPQIAAHVISEASSKTTSVLQWAEKGYYTMSNNLVTLENGKQLTVKRQGLYYIYAQVTFCSNREASSQAPFIASLCLKSPGRFERILLRAANTHSSAKPCGQQSIHLGGVFELQPGASVFVNVTDPSQVSHGTGFTSFGLLKL

SEQ ID NO: 3305 - protein, 205 aa, Unknown
  Description of Unknown: 41BB ligand sequence
ACPWAVSGARASPGSAASPRLREGPELSPDDPAGLLDLRQGMFAQLVAQNVLLIDGPLSWYSDPGLAGVSLTGGLSYKEDTKELVVAKAGVYYVFFQLELRRVVAGEGSGSVSLALHLQPLRSAAGAAALALTVDLPPASSEARNSAFGFQGRLLHLSAGQRLGVHLHTEARARHAWQLTQGATVLGLFRVTPEIPAGLPSPRSE

SEQ ID NO: 3306 - protein, 455 aa, Artificial Sequence
  Description of Artificial Sequence: Synthetic polypeptide
LNFRAPPVIPNVPFLWAWNAPSEFCLGKFDEPLDMSLFSFIGSPRINATGQGVTIFYVDRLGYYPYIDSITGVTVNGGIPQKISLQDHLDKAKKDITFYMPVDNLGMAVIDWEEWRPTWARNWKPKDVYKNRSIELVQQQNVQLSLTEATEKAKQEFEKAGKDFLVETIKLGKLLRPNHLWGYYLFPDCYNHHYKKPGYNGSCFNVEIKRNDDLSWLWNESTALYPSIYLNTQQSPVAATLYVRNRVREAIRVSKIPDAKSPLPVFAYTRIVFTDQVLKFLSQDELVYTFGETVALGASGIVIWGTLSIMRSMKSCLLLDNYMETILNPYIINVTLAAKMCSQVLCQEQGVCIRKNWNSSDYLHLNPDNFAIQLEKGGKFTVRGKPTLEDLEQFSEKFYCSCYSTLSCKEKADVKDTDAVDVCIADGVCIDAFLKPPMETEEPQIFYNASPSTLS

SEQ ID NO: 3307 - protein, 5 aa, Artificial Sequence
  Description of Artificial Sequence: Synthetic peptide
GGGGS

SEQ ID NO: 3308 - protein, 10 aa, Artificial Sequence
  Description of Artificial Sequence: Synthetic peptide
GGGGSGGGGS

SEQ ID NO: 3309 - protein, 15 aa, Artificial Sequence
  Description of Artificial Sequence: Synthetic peptide
GGGGSGGGGSGGGGS

SEQ ID NO: 3310 - protein, 17 aa, Artificial Sequence
  Description of Artificial Sequence: Synthetic peptide
DVPSGPGGGGGSGGGGS

SEQ ID NO: 3311 - protein, 455 aa, Unknown; identical to SEQ ID NO: 3306
  Description of Unknown: Hyaluronidase sequence

SEQ ID NO: 3312 - protein, 413 aa, Unknown
  Description of Unknown: HYAL1 sequence
FRGPLLPNRPFTTVWNANTQWCLERHGVDVDVSVFDVVANPGQTFRGPDMTIFYSSQGTYPYYTPTGEPVFGGLPQNASLIAHLARTFQDILAAIPAPDFSGLAVIDWEAWRPRWAFNWDTKDIYRQRSRALVQAQHPDWPAPQVEAVAQDQFQGAARAWMAGTLQLGRALRPRGLWGFYGFPDCYNYDFLSPNYTGQCPSGIRAQNDQLGWLWGQSRALYPSIYMPAVLEGTGKSQMYVQHRVAEAFRVAVAAGDPNLPVLPYVQIFYDTTNHFLPLDELEHSLGESAAQGAAGVVLWVSWENTRTKESCQAIKEYMDTTLGPFILNVTSGALLCSQALCSGHGRCVRRTSHPKALLLLNPASFSIQLTPGGGPLSLRGALSLEDQAQMAVEFKCRCYPGWQAPWCERKSMW

SEQ ID NO: 3313 - protein, 551 aa, Unknown
  Description of Unknown: Collagenase molecule IV sequence
YNFFPRKPKWDKNQITYRIIGYTPDLDPETVDDAFARAFQVWSDVTPLRFSRIHDGEADIMINFGRWEHGDGYPFDGKDGLLAHAFAPGTGVGGDSHFDDDELWTLGEGQVVRVKYGNADGEYCKFPFLFNGKEYNSCTDTGRSDGFLWCSTTYNFEKDGKYGFCPHEALFTMGGNAEGQPCKFPFRFQGTSYDSCTTEGRTDGYRWCGTTEDYDRDKKYGFCPETAMSTVGGNSEGAPCVFPFTFLGNKYESCTSAGRSDGKMWCATTANYDDDRKWGFCPDQGYSLFLVAAHEFGHAMGLEHSQDPGALMAPIYTYTKNFRLSQDDIKGIQELYGASPDIDLGTGPTPTLGPVTPEICKQDIVFDGIAQIRGEIFFFKDRFIWRTVTPRDKPMGPLLVATFWPELPEKIDAVYEAPQEEKAVFFAGNEYWIYSASTLERGYPKPLTSLGLPPDVQRVDAAFNWSKNKKTYIFAGDKFWRYNEVKKKMDPGFPKLIADAWNAIPDNLDAVVDLQGGGHSYFFKGAYYLKLENQSLKSVKFGSIKSDWLGC

SEQ ID NO: 3314 - protein, 14 aa, Artificial Sequence
  Description of Artificial Sequence: Synthetic peptide
AEAAAKEAAAKAAA

SEQ ID NO: 3315 - protein, 19 aa, Artificial Sequence
  Description of Artificial Sequence: Synthetic peptide
AEAAAKEAAAKEAAAKAAA

SEQ ID NO: 3316 - protein, 24 aa, Artificial Sequence
  Description of Artificial Sequence: Synthetic peptide
AEAAAKEAAAKEAAAKEAAAKAAA

SEQ ID NO: 3317 - protein, 29 aa, Artificial Sequence
  Description of Artificial Sequence: Synthetic peptide
AEAAAKEAAAKEAAAKEAAAKEAAAKAAA

SEQ ID NO: 3318-3376 - skipped (59 entries)

SEQ ID NO: 3377 - protein, 107 aa, Artificial Sequence; identical to SEQ ID NO: 93
  Description of Artificial Sequence: Synthetic polypeptide

SEQ ID NO: 3378 - protein, 107 aa, Artificial Sequence; identical to SEQ ID NO: 117
  Description of Artificial Sequence: Synthetic polypeptide

SEQ ID NO: 3379 - protein, 107 aa, Artificial Sequence; identical to SEQ ID NO: 199
  Description of Artificial Sequence: Synthetic polypeptide

SEQ ID NO: 3380 - protein, 107 aa, Artificial Sequence; identical to SEQ ID NO: 181
  Description of Artificial Sequence: Synthetic polypeptide

SEQ ID NO: 3381 - protein, 107 aa, Artificial Sequence; identical to SEQ ID NO: 87
  Description of Artificial Sequence: Synthetic polypeptide

SEQ ID NO: 3382 - protein, 107 aa, Artificial Sequence; identical to SEQ ID NO: 160
  Description of Artificial Sequence: Synthetic polypeptide

SEQ ID NO: 3383 - protein, 107 aa, Artificial Sequence; identical to SEQ ID NO: 147
  Description of Artificial Sequence: Synthetic polypeptide

SEQ ID NO: 3384 - protein, 107 aa, Artificial Sequence; identical to SEQ ID NO: 141
  Description of Artificial Sequence: Synthetic polypeptide

SEQ ID NO: 3385 - protein, 107 aa, Artificial Sequence; identical to SEQ ID NO: 81
  Description of Artificial Sequence: Synthetic polypeptide

SEQ ID NO: 3386 - protein, 107 aa, Artificial Sequence; identical to SEQ ID NO: 90
  Description of Artificial Sequence: Synthetic polypeptide

SEQ ID NO: 3387 - protein, 107 aa, Artificial Sequence; identical to SEQ ID NO: 102
  Description of Artificial Sequence: Synthetic polypeptide

SEQ ID NO: 3388 - protein, 107 aa, Artificial Sequence; identical to SEQ ID NO: 99
  Description of Artificial Sequence: Synthetic polypeptide

SEQ ID NO: 3389 - protein, 107 aa, Artificial Sequence; identical to SEQ ID NO: 108
  Description of Artificial Sequence: Synthetic polypeptide

SEQ ID NO: 3390 - protein, 119 aa, Artificial Sequence; identical to SEQ ID NO: 221
  Description of Artificial Sequence: Synthetic polypeptide

SEQ ID NO: 3391 - protein, 119 aa, Artificial Sequence; identical to SEQ ID NO: 223
  Description of Artificial Sequence: Synthetic polypeptide

SEQ ID NO: 3392 - protein, 119 aa, Artificial Sequence; identical to SEQ ID NO: 225
  Description of Artificial Sequence: Synthetic polypeptide

SEQ ID NO: 3393 - protein, 119 aa, Artificial Sequence; identical to SEQ ID NO: 219
  Description of Artificial Sequence: Synthetic polypeptide

SEQ ID NO: 3394 - protein, 119 aa, Artificial Sequence; identical to SEQ ID NO: 217
  Description of Artificial Sequence: Synthetic polypeptide

SEQ ID NO: 3395 - protein, 119 aa, Artificial Sequence; identical to SEQ ID NO: 211
  Description of Artificial Sequence: Synthetic polypeptide

SEQ ID NO: 3396 - protein, 119 aa, Artificial Sequence; identical to SEQ ID NO: 215
  Description of Artificial Sequence: Synthetic polypeptide

SEQ ID NO: 3397 - protein, 119 aa, Artificial Sequence; identical to SEQ ID NO: 213
  Description of Artificial Sequence: Synthetic polypeptide

SEQ ID NO: 3398 - protein, 119 aa, Artificial Sequence; identical to SEQ ID NO: 207
  Description of Artificial Sequence: Synthetic polypeptide

SEQ ID NO: 3399 - protein, 119 aa, Artificial Sequence; identical to SEQ ID NO: 209
  Description of Artificial Sequence: Synthetic polypeptide

SEQ ID NO: 3400 - protein, 119 aa, Artificial Sequence; identical to SEQ ID NO: 121
  Description of Artificial Sequence: Synthetic polypeptide

SEQ ID NO: 3401 - protein, 119 aa, Artificial Sequence; identical to SEQ ID NO: 182
  Description of Artificial Sequence: Synthetic polypeptide

SEQ ID NO: 3402 - protein, 119 aa, Artificial Sequence; identical to SEQ ID NO: 176
  Description of Artificial Sequence: Synthetic polypeptide

SEQ ID NO: 3403 - protein, 119 aa, Artificial Sequence; identical to SEQ ID NO: 158
  Description of Artificial Sequence: Synthetic polypeptide

SEQ ID NO: 3404 - protein, 119 aa, Artificial Sequence; identical to SEQ ID NO: 155
  Description of Artificial Sequence: Synthetic polypeptide

SEQ ID NO: 3405 - protein, 119 aa, Artificial Sequence; identical to SEQ ID NO: 118
  Description of Artificial Sequence: Synthetic polypeptide

SEQ ID NO: 3406 - protein, 119 aa, Artificial Sequence; identical to SEQ ID NO: 82
  Description of Artificial Sequence: Synthetic polypeptide

SEQ ID NO: 3407 - protein, 119 aa, Artificial Sequence; identical to SEQ ID NO: 106
  Description of Artificial Sequence: Synthetic polypeptide

SEQ ID NO: 3408 - protein, 119 aa, Artificial Sequence; identical to SEQ ID NO: 200
  Description of Artificial Sequence: Synthetic polypeptide

SEQ ID NO: 3409 - protein, 119 aa, Artificial Sequence; identical to SEQ ID NO: 124
  Description of Artificial Sequence: Synthetic polypeptide

SEQ ID NO: 3410 - protein, 119 aa, Artificial Sequence; identical to SEQ ID NO: 94
  Description of Artificial Sequence: Synthetic polypeptide

SEQ ID NO: 3411 - protein, 119 aa, Artificial Sequence; identical to SEQ ID NO: 151
  Description of Artificial Sequence: Synthetic polypeptide

SEQ ID NO: 3412 - protein, 119 aa, Artificial Sequence; identical to SEQ ID NO: 197
  Description of Artificial Sequence: Synthetic polypeptide

SEQ ID NO: 3413 - protein, 119 aa, Artificial Sequence; identical to SEQ ID NO: 130
  Description of Artificial Sequence: Synthetic polypeptide

SEQ ID NO: 3414 - protein, 119 aa, Artificial Sequence; identical to SEQ ID NO: 173
  Description of Artificial Sequence: Synthetic polypeptide

SEQ ID NO: 3415 - protein, 119 aa, Artificial Sequence; identical to SEQ ID NO: 142
  Description of Artificial Sequence: Synthetic polypeptide

SEQ ID NO: 3416 - protein, 119 aa, Artificial Sequence; identical to SEQ ID NO: 91
  Description of Artificial Sequence: Synthetic polypeptide

SEQ ID NO: 3417 - protein, 119 aa, Artificial Sequence; identical to SEQ ID NO: 139
  Description of Artificial Sequence: Synthetic polypeptide

SEQ ID NO: 3418 - protein, 119 aa, Artificial Sequence; identical to SEQ ID NO: 185
  Description of Artificial Sequence: Synthetic polypeptide

SEQ ID NO: 3419 - protein, 119 aa, Artificial Sequence; identical to SEQ ID NO: 133
  Description of Artificial Sequence: Synthetic polypeptide

SEQ ID NO: 3420 - protein, 119 aa, Artificial Sequence; identical to SEQ ID NO: 188
  Description of Artificial Sequence: Synthetic polypeptide

SEQ ID NO: 3421 - protein, 119 aa, Artificial Sequence; identical to SEQ ID NO: 109
  Description of Artificial Sequence: Synthetic polypeptide

SEQ ID NO: 3422 - protein, 119 aa, Artificial Sequence; identical to SEQ ID NO: 97
  Description of Artificial Sequence: Synthetic polypeptide

SEQ ID NO: 3423 - protein, 119 aa, Artificial Sequence; identical to SEQ ID NO: 85
  Description of Artificial Sequence: Synthetic polypeptide

SEQ ID NO: 3424 - protein, 119 aa, Artificial Sequence; identical to SEQ ID NO: 115
  Description of Artificial Sequence: Synthetic polypeptide

SEQ ID NO: 3425 - protein, 119 aa, Artificial Sequence; identical to SEQ ID NO: 191
  Description of Artificial Sequence: Synthetic polypeptide

SEQ ID NO: 3426 - protein, 119 aa, Artificial Sequence; identical to SEQ ID NO: 136
  Description of Artificial Sequence: Synthetic polypeptide

SEQ ID NO: 3427 - protein, 119 aa, Artificial Sequence; identical to SEQ ID NO: 203
  Description of Artificial Sequence: Synthetic polypeptide

SEQ ID NO: 3428 - protein, 119 aa, Artificial Sequence; identical to SEQ ID NO: 103
  Description of Artificial Sequence: Synthetic polypeptide

SEQ ID NO: 3429 - protein, 119 aa, Artificial Sequence; identical to SEQ ID NO: 205
  Description of Artificial Sequence: Synthetic polypeptide

SEQ ID NO: 3430 - protein, 119 aa, Artificial Sequence; identical to SEQ ID NO: 100
  Description of Artificial Sequence: Synthetic polypeptide

SEQ ID NO: 3431 - protein, 119 aa, Artificial Sequence; identical to SEQ ID NO: 179
  Description of Artificial Sequence: Synthetic polypeptide

SEQ ID NO: 3432 - protein, 119 aa, Artificial Sequence; identical to SEQ ID NO: 88
  Description of Artificial Sequence: Synthetic polypeptide

SEQ ID NO: 3433 - protein, 119 aa, Artificial Sequence; identical to SEQ ID NO: 167
  Description of Artificial Sequence: Synthetic polypeptide

SEQ ID NO: 3434 - protein, 119 aa, Artificial Sequence; identical to SEQ ID NO: 161
  Description of Artificial Sequence: Synthetic polypeptide

SEQ ID NO: 3435 - protein, 119 aa, Artificial Sequence; identical to SEQ ID NO: 145
  Description of Artificial Sequence: Synthetic polypeptide

SEQ ID NO: 3436 - protein, 119 aa, Artificial Sequence; identical to SEQ ID NO: 148
  Description of Artificial Sequence: Synthetic polypeptide

SEQ ID NO: 3437 - protein, 27 aa, Artificial Sequence
  Description of Artificial Sequence: Synthetic peptide
  SITE (2)..(26): This region may encompass 2-5 "Glu Ala Ala Ala Lys" repeating units
AEAAAKEAAAKEAAAKEAAAKEAAAKA

SEQ ID NO: 3438 - protein, 117 aa, Artificial Sequence; identical to SEQ ID NO: 24
  Description of Artificial Sequence: Synthetic polypeptide

SEQ ID NO: 3439 - protein, 116 aa, Artificial Sequence
  Description of Artificial Sequence: Synthetic polypeptide
EVQLLESGGGLVQPGGSLRLSCAASGFTFSSYAMSWVRQAPGKGLEWVSAISGSGGSTYYADSVKGRFTISRDNSKNTLYLQMNSLRAEDTAVYYCAKVLGWFDYWGQGTLVTVSS

SEQ ID NO: 3440 - protein, 109 aa, Artificial Sequence
  Description of Artificial Sequence: Synthetic polypeptide
EIVLTQSPGTLSLSPGERATLSCRASQSVSSSYLAWYQQKPGQAPRLLIYGASSRATGIPDRFSGSGSGTDFTLTISRLEPEDFAVYYCQQYGYPPDFTFGQGTKVEIK

SEQ ID NO: 3441 - protein, 119 aa, Artificial Sequence
  Description of Artificial Sequence: Synthetic polypeptide
EVQLLESGGGLVQPGGSLRLSCAASGFTFSSYAMSWVRQAPGKGLEWVSAISGSGGSTYYADSVKGRFTISRDNSKNTLYLQMNSLRAEDTAVYYCAKVAPYFAPFDYWGQGTLVTVSS

SEQ ID NO: 3442 - protein, 109 aa, Artificial Sequence
  Description of Artificial Sequence: Synthetic polypeptide
EIVLTQSPGTLSLSPGERATLSCRASQSVSSSYLAWYQQKPGQAPRLLIYGASSRATGIPDRFSGSGSGTDFTLTISRLEPEDFAVYYCQQYGNPPLYTFGQGTKVEIK

SEQ ID NO: 3443 - protein, 116 aa, Artificial Sequence
  Description of Artificial Sequence: Synthetic polypeptide
EVQLVQSGAEVKKPGESLKISCKGSGYSFTSYWIGWVRQMPGKGLEWMGIIYPGDSDTRYSPSFQGQVTISADKSISTAYLQWSSLKASDTAMYYCARNGYLGDYWGQGTLVTVSS

SEQ ID NO: 3444 - protein, 111 aa, Artificial Sequence
  Description of Artificial Sequence: Synthetic polypeptide
DIVMTQSPLSLPVTPGEPASISCRSSQSLLHSNGYNYLDWYLQKPGQSPQLLIYLGSNRASGVPDRFSGSGSGTDFTLKISRVEAEDVGVYYCMQAMQIPTFGQGTKVEIK

SEQ ID NO: 3445 - protein, 120 aa, Artificial Sequence
  Description of Artificial Sequence: Synthetic polypeptide
QVQLQQSGGGLVQPGGSLKLSCAASGIDFSRYWMSWVRRAPGKGLEWIGEINPDSSTINYAPSLKDKFIISRDNAKNTLYLQMSKVRSEDTALYYCASLYYDYGDAMDYWGQGTSVTVSS

SEQ ID NO: 3446 - protein, 108 aa, Artificial Sequence
  Description of Artificial Sequence: Synthetic polypeptide
DIVMTQSQRFMTTSVGDRVSVTCKASQSVDSNVAWYQQKPRQSPKALIFSASLRFSGVPARFTGSGSGTDFTLTISNLQSEDLAEYFCQQYNNYPLTFGAGTKLELKR

SEQ ID NO: 3447 - protein, 123 aa, Artificial Sequence
  Description of Artificial Sequence: Synthetic polypeptide
EVQLVESGGGLVKPGGSLRLSCAASGFTFGDYALSWFRQAPGKGLEWVGVSRSKAYGGTTDYAASVKGRFTISRDDSKSTAYLQMNSLKTEDTAVYYCASSGYSSGWTPFDYWGQGTLVTVSS

SEQ ID NO: 3448 - protein, 111 aa, Artificial Sequence
  Description of Artificial Sequence: Synthetic polypeptide
QSVLTQPPSASGTPGQRVTISCSGSSSNIGSNTVNWYQQLPGTAPKLLIFNYHQRPSGVPDRFSGSKSGSSASLAISGLQSEDEADYYCAAWDDSLNGWVFGGGTKLTVLG

SEQ ID NO: 3449 - protein, 101 aa, Artificial Sequence
  Description of Artificial Sequence: Synthetic polypeptide
IAGITQAPTSQILAAGRRMTLRCTQDMRHNAMYWYRQDLGLGLRLIHYSNTAGTTGKGEVPDGYSVSRANTDDFPLTLASAVPSQTSVYFCASSWSFGTEA

SEQ ID NO: 3450 - protein, 100 aa, Artificial Sequence
  Description of Artificial Sequence: Synthetic polypeptide
GVTQTPKFQVLKTGQSMTLQCAQDMNHEYMSWYRQDPGMGLRLIHYSVGAGITDQGEVPNGYNVSRSTTEDFPLRLLSAAPSQTSVYFCASSYVGNTGEL

SEQ ID NO: 3451 - protein, 100 aa, Artificial Sequence
  Description of Artificial Sequence: Synthetic polypeptide
KVTQSSRYLVKRTGEKVFLECVQDMDHENMFWYRQDPGLGLRLIYFSYDVKMKEKGDIPEGYSVSREKKERFSLILASASTDQTSMYLCASSFLGTGVEQ

SEQ ID NO: 3452 - protein, 100 aa, Artificial Sequence
  Description of Artificial Sequence: Synthetic polypeptide
GGITQSPKYLFRKEGQNVTLSCEQNLNHDAMYWYRQDPGQGLRLIYYSQIVNDFQKGDIAEGYSVSREKKESFPLTVTSAQKNPTAFYLCASSSRSSYEQ

SEQ ID NO: 3453 - protein, 101 aa, Artificial Sequence
  Description of Artificial Sequence: Synthetic polypeptide
GVTQTPKHLITATGQRVTLRCSPRSGDLSVYWYQQSLDQGLQFLIQYYNGEERAKGNILERFSAQQFPDLHSELNLSSLELGDSALYFCASSVAGTPSYEQ

SEQ ID NO: 3454 - protein, 100 aa, Artificial Sequence
  Description of Artificial Sequence: Synthetic polypeptide
AGVTQTPRYLIKTRGQQVTLSCSPISGHRSVSWYQQTPGQGLQFLFEYFSETQRNKGNFPGRFSGRQFSNSRSEMNVSTLELGDSALYLCASSFNMATGQ

SEQ ID NO: 3455 - protein, 99 aa, Artificial Sequence
  Description of Artificial Sequence: Synthetic polypeptide
AVVSQHPSRVIVKSGTSVKIECRSLDFQATTMFWYRQFPSLMLMATSNEGSKATYEQGVEKDKFLINHASLTLSTLTVTSAHPEDSGFYICSALAGDTQ

SEQ ID NO: 3456 - protein, 106 aa, Artificial Sequence
  Description of Artificial Sequence: Synthetic polypeptide
MDAGVIQSPRHEVTEMGQQVTLRCKPISGHDYLFWYRQTMMRGLELLIYFNNNVPIDDSGMPEDRFSAKMPNASFSTLKIQPSEPRDSAVYFCASSLWEKLAKNIQ

SEQ ID NO: 3457 - protein, 94 aa, Artificial Sequence
  Description of Artificial Sequence: Synthetic polypeptide
DTGITQTPKYLVTAMGSKRTMKREHLGHDSMYWYRQKAKKSLEFMFYYNCKEFIENKTVPNHFTPECPDSSRLYLHVVALQQEDSAAYLCTSSQ

SEQ ID NO: 3458 - protein, 96 aa, Artificial Sequence
  Description of Artificial Sequence: Synthetic polypeptide
EPEVTQTPSHQVTQMGQEVILRCVPISNHLYFYWYRQILGQKVEFLVSFYNNEISEKSEIFDDQFSVERPDGSNFTLKIRSTKLEDSAMYFCASSE

SEQ ID NO: 3459 - protein, 95 aa, Artificial Sequence
  Description of Artificial Sequence: Synthetic polypeptide
DTAVSQTPKYLVTQMGNDKSIKCEQNLGHDTMYWYKQDSKKFLKIMFSYNNKELIINETVPNRFSPKSPDKAHLNLHINSLELGDSAVYFCASSQ

SEQ ID NO: 3460 - protein, 94 aa, Artificial Sequence
  Description of Artificial Sequence: Synthetic polypeptide
DTAVSQTPKYLVTQMGKKESLKEQNLGHNAMYWYKQDSKKFLKTMFIYSNKEPILNETVPNRFSPDSPDKAHLNLHINSLELGDSAVYFCASSQ

SEQ ID NO: 3461 - protein, 95 aa, Artificial Sequence
  Description of Artificial Sequence: Synthetic polypeptide
DTEVTQTPKHLVMGMTNKKSLKCEQHMGHRAMYWYKQKAKKPPELMFVYSYEKLSINESVPSRFSPECPNSSLLNLHLHALQPEDSALYLCASSQ

SEQ ID NO: 3462 - protein, 95 aa, Artificial Sequence
  Description of Artificial Sequence: Synthetic polypeptide
ETGVTQTPRHLVMGMTNKKSLKCEQHLGHNAMYWYKQSAKKPLELMFVYNFKEQTENNSVPSRFSPECPNSSHLFLHLHTLQPEDSALYLCASSQ

SEQ ID NO: 3463 - protein, 95 aa, Artificial Sequence
  Description of Artificial Sequence: Synthetic polypeptide
ETGVTQTPRHLVMGMTNKKSLKCEQHLGHNAMYWYKQSAKKPLELMFVYSLEERVENNSVPSRFSPECPNSSHLFLHLHTLQPEDSALYLCASSQ

SEQ ID NO: 3464 - protein, 95 aa, Artificial Sequence
  Description of Artificial Sequence: Synthetic polypeptide
KAGVTQTPRYLIKTRGQQVTLSCSPISGHRSVSWYQQTPGQGLQFLFEYFSETQRNKGNFPGRFSGRQFSNSRSEMNVSTLELGDSALYLCASSL

SEQ ID NO: 3465 - protein, 95 aa, Artificial Sequence
  Description of Artificial Sequence: Synthetic polypeptide
EAGVTQSPTHLIKTRGQQVTLRCSPISGHSSVSWYQQAPGQGPQFIFEYANELRRSEGNFPNRFSGRQFHDCCSEMNVSALELGDSALYLCARSL

SEQ ID NO: 3466 - protein, 95 aa, Artificial Sequence
  Description of Artificial Sequence: Synthetic polypeptide
ETGVTQSPTHLIKTRGQQVTLRCSSQSGHNTVSWYQQALGQGPQFIFQYYREEENGRGNFPPRFSGLQFPNYSSELNVNALELDDSALYLCASSL

SEQ ID NO: 3467 - protein, 95 aa, Artificial Sequence
  Description of Artificial Sequence: Synthetic polypeptide
DAGVTQSPTHLIKTRGQQVTLRCSPISGHKSVSWYQQVLGQGPQFIFQYYEKEERGRGNFPDRFSARQFPNYSSELNVNALLLGDSALYLCASSL

SEQ ID NO: 3468 - protein, 95 aa, Artificial Sequence
  Description of Artificial Sequence: Synthetic polypeptide
DAGVTQSPTHLIKTRGQQVTLRCSPKSGHDTVSWYQQALGQGPQFIFQYYEEEERQRGNFPDRFSGHQFPNYSSELNVNALLLGDSALYLCASSL

SEQ ID NO: 3469 - protein, 95 aa, Artificial Sequence
  Description of Artificial Sequence: Synthetic polypeptide
DAGVTQSPTHLIKTRGQHVTLRCSPISGHTSVSSYQQALGQGPQFIFQYYEKEERGRGNFPDQFSGHQFPNYSSELNVNALLLGDSALYLCASSL

SEQ ID NO: 3470 - protein, 95 aa, Artificial Sequence
  Description of Artificial Sequence: Synthetic polypeptide
EAGVTQSPTHLIKTRGQQATLRCSPISGHTSVYWYQQALGLGLQFLLWYDEGEERNRGNFPPRFSGRQFPNYSSELNVNALELEDSALYLCASSL

SEQ ID NO: 3471 - protein, 95 aa, Artificial Sequence
  Description of Artificial Sequence: Synthetic polypeptide
NAGVTQTPKFQVLKTGQSMTLQCAQDMNHNSMYWYRQDPGMGLRLIYYSASEGTTDKGEVPNGYNVSRLNKREFSLRLESAAPSQTSVYFCASSE

SEQ ID NO: 3472 - protein, 95 aa, Artificial Sequence
  Description of Artificial Sequence: Synthetic polypeptide
NAGVTQTPKFRVLKTGQSMTLLCAQDMNHEYMYWYRQDPGMGLRLIHYSVGEGTTAKGEVPDGYNVSRLKKQNFLLGLESAAPSQTSVYFCASSY

SEQ ID NO: 3473 - protein, 95 aa, Artificial Sequence; identical to SEQ ID NO: 3472
  Description of Artificial Sequence: Synthetic polypeptide

SEQ ID NO: 3474 - protein, 95 aa, Artificial Sequence
  Description of Artificial Sequence: Synthetic polypeptide
IAGITQAPTSQILAAGRRMTLRCTQDMRHNAMYWYRQDLGLGLRLIHYSNTAGTTGKGEVPDGYSVSRANTDDFPLTLASAVPSQTSVYFCASSD

SEQ ID NO: 3475 - protein, 95 aa, Artificial Sequence
  Description of Artificial Sequence: Synthetic polypeptide
NAGVTQTPKFQVLKTGQSMTLQCAQDMNHEYMSWYRQDPGMGLRLIHYSVGAGITDQGEVPNGYNVSRSTTEDFPLRLLSAAPSQTSVYFCASSY

SEQ ID NO: 3476 - protein, 95 aa, Artificial Sequence
  Description of Artificial Sequence: Synthetic polypeptide
NAGVTQTPKFRILKIGQSMTLQCTQDMNHNYMYWYRQDPGMGLKLIYYSVGAGITDKGEVPNGYNVSRSTTEDFPLRLELAAPSQTSVYFCASSY

SEQ ID NO: 3477 - protein, 95 aa, Artificial Sequence
  Description of Artificial Sequence: Synthetic polypeptide
NAGVTQTPKFHVLKTGQSMTLLCAQDMNHEYMYRYRQDPGKGLRLIYYSVAAALTDKGEVPNGYNVSRSNTEDFPLKLESAAPSQTSVYFCASSY

SEQ ID NO: 3478 - protein, 94 aa, Artificial Sequence
  Description of Artificial Sequence: Synthetic polypeptide
NAGVTQTPKFHILKTGQSMTLQCAQDMNHGYMSWYRQDPGMGLRLIYYSAAAGTTDKEVPNGYNVSRLNTEDFPLRLVSAAPSQTSVYLCASSY

SEQ ID NO: 3479 - protein, 95 aa, Artificial Sequence
  Description of Artificial Sequence: Synthetic polypeptide
NAGVTQTPKFHILKTGQSMTLQCAQDMNHGYLSWYRQDPGMGLRRIHYSVAAGITDKGEVPDGYNVSRSNTEDFPLRLESAAPSQTSVYFCASSY

SEQ ID NO: 3480 - protein, 96 aa, Artificial Sequence
  Description of Artificial Sequence: Synthetic polypeptide
GAGVSQSLRHKVAKKGKDVALRYDPISGHNALYWYRQSLGQGLEFPIYFQGKDAADKSGLPRDRFSAQRSEGSISTLKFQRTQQGDLAVYLCASSS

SEQ ID NO: 3481 - protein, 96 aa, Artificial Sequence
  Description of Artificial Sequence: Synthetic polypeptide
GAGVSQSPSNKVTEKGKDVELRCDPISGHTALYWYRQSLGQGLEFLIYFQGNSAPDKSGLPSDRFSAERTGGSVSTLTIQRTQQEDSAVYLCASSL

SEQ ID NO: 3482 - protein, 96 aa, Artificial Sequence
  Description of Artificial Sequence: Synthetic polypeptide
GAGVSQTPSNKVTEKGKYVELRCDPISGHTALYWYRQSLGQGPEFLIYFQGTGAADDSGLPNDRFFAVRPEGSVSTLKIQRTERGDSAVYLCASSL

SEQ ID NO: 3483 - protein, 96 aa, Artificial Sequence
  Description of Artificial Sequence: Synthetic polypeptide
GAGVSQSPRYKVAKRGRDVALRCDSISGHVTLYWYRQTLGQGSEVLTYSQSDAQRDKSGRPSGRFSAERPERSVSTLKIQRTEQGDSAVYLCASSL

SEQ ID NO: 3484 - protein, 96 aa, Artificial Sequence
  Description of Artificial Sequence: Synthetic polypeptide
GAGVSQSPRYKVTKRGQDVALRCDPISGHVSLYWYRQALGQGPEFLTYFNYEAQQDKSGLPNDRFSAERPEGSISTLTIQRTEQRDSAMYRCASSL

SEQ ID NO: 3485 - protein, 96 aa, Artificial Sequence
  Description of Artificial Sequence: Synthetic polypeptide
GAGVSQSPRYKVTKRGQDVTLRCDPISSHATLYWYQQALGQGPEFLTYFNYEAQPDKSGLPSDRFSAERPEGSISTLTIQRTEQRDSAMYRCASSL

SEQ ID NO: 3486 - protein, 96 aa, Artificial Sequence
  Description of Artificial Sequence: Synthetic polypeptide
GAGVSQSPRYKVAKRGQDVALRCDPISGHVSLFWYQQALGQGPEFLTYFQNEAQLDKSGLPSDRFFAERPEGSVSTLKIQRTQQEDSAVYLCASSL

SEQ ID NO: 3487 - protein, 96 aa, Artificial Sequence
  Description of Artificial Sequence: Synthetic polypeptide
DTGVSQNPRHKITKRGQNVTFRCDPISEHNRLYWYRQTLGQGPEFLTYFQNEAQLEKSRLLSDRFSAERPKGSFSTLEIQRTEQGDSAMYLCASSL

SEQ ID NO: 3488 - protein, 95 aa, Artificial Sequence
  Description of Artificial Sequence: Synthetic polypeptide
DSGVTQTPKHLITATGQRVTLRCSPRSGDLSVYWYQQSLDQGLQFLIQYYNGEERAKGNILERFSAQQFPDLHSELNLSSLELGDSALYFCASSV

SEQ ID NO: 3489 - protein, 95 aa, Artificial Sequence
  Description of Artificial Sequence: Synthetic polypeptide
DAEITQSPRHKITETGRQVTLACHQTWNHNNMFWYRQDLGHGLRLIHYSYGVQDTNKGEVSDGYSVSRSNTEDLPLTLESAASSQTSVYFCASSE

SEQ ID NO: 3490 - protein, 95 aa, Artificial Sequence
  Description of Artificial Sequence: Synthetic polypeptide
DAGITQSPRYKITETGRQVTLMCHQTWSHSYMFWYRQDLGHGLRLIYYSAAADITDKGEVPDGYVVSRSKTENFPLTLESATRSQTSVYFCASSE

SEQ ID NO: 3491 - protein, 95 aa, Artificial Sequence
  Description of Artificial Sequence: Synthetic polypeptide
DAGITQSPRHKVTETGTPVTLRCHQTENHRYMYWYRQDPGHGLRLIHYSYGVKDTDKGEVSDGYSVSRSKTEDFLLTLESATSSQTSVYFCAISE

SEQ ID NO: 3492 - protein, 96 aa, Artificial Sequence
  Description of Artificial Sequence: Synthetic polypeptide
EAEVAQSPRYKITEKSQAVAFWCDPISGHATLYWYRQILGQGPELLVQFQDESVVDDSQLPKDRFSAERLKGVDSTLKIQPAELGDSAMYLCASSL

SEQ ID NO: 3493 - protein, 96 aa, Artificial Sequence
  Description of Artificial Sequence: Synthetic polypeptide
EAGVAQSPRYKIIEKRQSVAFWCNPISGHATLYWYQQILGQGPKLLIQFQNNGVVDDSQLPKDRFSAERLKGVDSTLKIQPAKLEDSAVYLCASSL

SEQ ID NO: 3494 - protein, 96 aa, Artificial Sequence
  Description of Artificial Sequence: Synthetic polypeptide
EAGVVQSPRYKIIEKKQPVAFWCNPISGHNTLYWYLQNLGQGPELLIRYENEEAVDDSQLPKDRFSAERLKGVDSTLKIQPAELGDSAVYLCASSL

SEQ ID NO: 3495 - protein, 95 aa, Artificial Sequence
  Description of Artificial Sequence: Synthetic polypeptide
DAGVIQSPRHKVTEMGQSVTLRCEPISGHNDLLWYRQTFVQGLELLNYFCSWTLVDDSGVSKDFSAQMPDVSFSTLRIQPMEPRDLGLYFCASSF

SEQ ID NO: 3496 - protein, 95 aa, Artificial Sequence
  Description of Artificial Sequence: Synthetic polypeptide
DAGIIQSPKHEVTEMGQTVTLRCEPIFGHNFLFWYRDTFVQGLELLSYFRSSIIDNAGMPTERFSAERPDGSFSTLKIQPAEQGDSAVYVCASRL

SEQ ID NO: 3497 - protein, 96 aa, Artificial Sequence
  Description of Artificial Sequence: Synthetic polypeptide
DAGVIQSPRHEVTEMGQEVTLRCKPISGHNSLFWYRQTMMRGLELLIYFNNNVPIDDSGMPEDRFSAKMPNASFSTLKIQPSEPRDSAVYFCASSL

SEQ ID NO: 3498 - protein, 96 aa, Artificial Sequence
  Description of Artificial Sequence: Synthetic polypeptide
DAGVIQSPRHEVTEMGQEVTLRCKPISGHDYLFWYRQTMMRGLELLIYFNNNVPIDDSGMPEDRFSAKMPNASFSTLKIQPSEPRDSAVYFCASSL

SEQ ID NO: 3499 - protein, 96 aa, Artificial Sequence
  Description of Artificial Sequence: Synthetic polypeptide
DARVTQTPRHKVTEMGQEVTMRCQPILGHNTVFWYRQTMMQGLELLAYFRNRAPLDDSGMPKDRFSAEMPDATLATLKIQPSEPRDSAVYFCASGL

SEQ ID NO: 3500 - protein, 95 aa, Artificial Sequence
  Description of Artificial Sequence: Synthetic polypeptide
AAGVIQSPRHLIKEKRETATLKCYPIPRHDTVYWYQQGPGQDPQFLISFYEKMQSDKGSIPDRFSAQQFSDYHSELNMSSLELGDSALYFCASSL

SEQ ID NO: 3501 - protein, 96 aa, Artificial Sequence
  Description of Artificial Sequence: Synthetic polypeptide
EAGVTQFPSHSVIEKGQTVTLRCDPISGHDNLYWYRRVMGKEIKFLLHFVKESKQDESGMPNNRFLAERTGGTYSTLKVQPAELEDSGVYFCASSQ

SEQ ID NO: 3502 - protein, 95 aa, Artificial Sequence
  Description of Artificial Sequence: Synthetic polypeptide
DAMVIQNPRYQVTQFGKPVTLSCSQTLNHNVMYWYQQKSSQAPKLLFHYYDKDFNNEADTPDNFQSRRPNTSFCFLDIRSPGLGDTAMYLCATSR

SEQ ID NO: 3503 - protein, 96 aa, Artificial Sequence
  Description of Artificial Sequence: Synthetic polypeptide
GEEVAQTPKHLVRGEGQKAKLYCAPIKGHSYVFWYQQVLKNEFKFLISFQNENVFDETGMPKERFSAKCLPNSPCSLEIQATKLEDSAVYFCASSQ

SEQ ID NO: 3504 - protein, 95 aa, Artificial Sequence
  Description of Artificial Sequence: Synthetic polypeptide
EPGVSQTPRHKVTNMGQEVILRCDPSSGHMFVHWYRQNLRQEMKLLISFQYQNIAVDSGMPKERFTAERPNGTSSTLKIHPAEPRDSAVYLYSSG

SEQ ID NO: 3505 - protein, 96 aa, Artificial Sequence
  Description of Artificial Sequence: Synthetic polypeptide
NAGVMQNPRHLVRRRGQEARLRCSPMKGHSHVYWYRQLPEEGLKFMVYLQKENIIDESGMPKERFSAEFPKEGPSILRIQQVVRGDSAAYFCASSP

SEQ ID NO: 3506 - protein, 95 aa, Artificial Sequence
  Description of Artificial Sequence: Synthetic polypeptide
DGGITQSPKYLFRKEGQNVTLSCEQNLNHDAMYWYRQDPGQGLRLIYYSQIVNDFQKGDIAEGYSVSREKKESFPLTVTSAQKNPTAFYLCASSI

SEQ ID NO: 3507 - protein, 97 aa, Artificial Sequence
  Description of Artificial Sequence: Synthetic polypeptide
GAVVSQHPSWVICKSGTSVKIECRSLDFQATTMFWYRQFPKQSLMLMATSNEGSKATYEQGVEKDKFLINHASLTLSTLTVTSAHPEDSSFYICSAR

SEQ ID NO: 3508 - protein, 96 aa, Artificial Sequence
  Description of Artificial Sequence: Synthetic polypeptide
DTKVTQRPRLLVKASEQKAKMDCVPIKAHSYVYWYRKKLEEELKFLVYFQNEELIQKAEIINERFLAQCSKNSSCTLEIQSTESGDTALYFCASSK

SEQ ID NO: 3509 - protein, 96 aa, Artificial Sequence
  Description of Artificial Sequence: Synthetic polypeptide
HAKVTQTPGHLVKGKGQKTKMDCTPEKGHTFVYWYQQNQNKEFMLLISFQNEQVLQETEMHKKRFSSQCPKNAPCSLAILSSEPGDTALYLCASSQ

SEQ ID NO: 3510 - protein, 96 aa, Artificial Sequence
  Description of Artificial Sequence: Synthetic polypeptide
DADVTQTPRNRITKTGKRIMLECSQTKGHDRMYWYRQDPGLGLRLIYYSFDVKDINKGEISDGYSVSRQAQAKFSLSLESAIPNQTALYFCATSDL

SEQ ID NO: 3511 - protein, 95 aa, Artificial Sequence
  Description of Artificial Sequence: Synthetic polypeptide
EADIYQTPRYLVIGTGKKITLECSQTMGHDKMYWYQQDPGMELHLIHYSYGVNSTEKGDLSSESTVSRIRTEHFPLTLESARPSHTSQYLCASSE

SEQ ID NO: 3512 - protein, 94 aa, Artificial Sequence
  Description of Artificial Sequence: Synthetic polypeptide
DAVVTQFPRHRIIGTGKEFILQCSQNMNHVTMYWYRQDPGLGLKLVYYSPGTGSTEKGDISEGYHVSNTIASFPLTLKSASTNQTSVYLYASSS

SEQ ID NO: 3513 - protein, 95 aa, Artificial Sequence
  Description of Artificial Sequence: Synthetic polypeptide
EAQVTQNPRYLITVTGKKLTVTCSQNMNHEYMSWYRQDPGLGLRQIYYSMNVEVTDKGDVPEGYKVSRKEKRNFPLILESPSPNQTSLYFCASSL

SEQ ID NO: 3514 - protein, 95 aa, Artificial Sequence
  Description of Artificial Sequence: Synthetic polypeptide
DVKVTQSSRYLVKRTGEKVFLECVQDMDHENMFWYRQDPGLGLRLIYFSYDVKMKEKGDIPEGYSVSREKKERFSLILESASTNQTSMYLCASSL

SEQ ID NO: 3515 - protein, 96 aa, Artificial Sequence
  Description of Artificial Sequence: Synthetic polypeptide
SAVISQKPSRDICQRGTSLTIQCQVDSQVTMMFWYRQQPGQSLTLIATANQGSEATYESGFVIDKFPISRPNLTFSTLTVSNMSPEDSSIYLCSVE

SEQ ID NO: 3516 - protein, 94 aa, Artificial Sequence
  Description of Artificial Sequence: Synthetic polypeptide
SQTIHQWPATLVQPVGSPLSLECTVEGTSNPNLYWYRQAAGRGLQLLFYSVGIGQISSEVPQNLSASRPQDRQFILSSKKLLLSDSGFYLCAWS

SEQ ID NO: 3517-3639 - skipped (123 entries)

SEQ ID NO: 3640 - protein, 10 aa, Artificial Sequence
  Description of Artificial Sequence: Synthetic peptide
GFNIKSAYMH

SEQ ID NO: 3641 - protein, 11 aa, Artificial Sequence
  Description of Artificial Sequence: Synthetic peptide
SESVDSYGNSF

SEQ ID NO: 3642 - protein, 243 aa, Artificial Sequence
  Description of Artificial Sequence: Synthetic polypeptide
EVQLVESGGGLVQPGGSLRLSCAASGFTFSNFGMHWVRQAPGKGLEWVSYISSGSSTIYYADTLKGRFTISRDNSKNTLYLQMNSLRAEDTAVYYCARRGEGAMDYWGQGTTVTVSSGGGGSGGGGSGGGGSGGGGSDNQLTQSPSFLSASVGDRVTITCRASSSVNYIYWYQQKPGKAPKLLIYYTSNLAPGVPSRFSGSGSGNEYTLTISSLQPEDFATYYCQQFTSSPFTFGQGTKLEIK
